(19) United States
(12) Patent Application Publication
(10) Pub. No.: US 2024/0076675 A1
(43) Pub. Date: Mar. 7, 2024

(54) MODULATORS OF PNPLA3 EXPRESSION

(71) Applicant: Ionis Pharmaceuticals, Inc., Carlsbad, CA (US)

(72) Inventors: Susan M. FREIER, San Marcos, CA (US); Huynh-Hoa BUI, San Diego, CA (US)

(21) Appl. No.: 18/457,941

(22) Filed: Aug. 29, 2023

Related U.S. Application Data
(62) Division of application No. 16/936,060, filed on Jul. 22, 2020, now Pat. No. 11,781,143.
Application No. 16/936,060 is a continuation of application No. 16/574,407, filed on Sep. 18, 2019, now Pat. No. 10,774,333.
(60) Provisional application No. 62/733,152, filed on Sep. 19, 2018.

(51) Int. Cl. C12N 15/113; A61P 1/16

(52) U.S. Cl. CPC C12N 15/1137; A61P 1/16; C12N 2310/315; C12N 2310/32

(57) ABSTRACT

The present embodiments provide methods, compounds, and compositions useful for inhibiting PNPLA3 expression, which may be useful for treating, preventing, or ameliorating a disease associated with PNPLA3.

### SEQUENCE LISTING

[0001] The present application is being filed along with a Sequence Listing in electronic format. The Sequence Listing is provided as a file entitled 200797-BIOL0317SEQ.xml, created Aug. 25, 2023, which is 1,952 kb in size. The information in the electronic format of the sequence listing is incorporated herein by reference in its entirety.

### FIELD

[0002] The present embodiments provide methods, compounds, and compositions useful for inhibiting PNPLA3 (patatin like phospholipase domain containing 3; hypothetical protein dJ796I17.1; adiponutrin; DJ796I17.1) expression, and in certain instances, reducing the amount of PNPLA3 protein in a cell or animal, which can be useful for treating, preventing, or ameliorating a disease associated with PNPLA3.

### BACKGROUND

[0003] Non-alcoholic fatty liver disease (NAFLD) covers a spectrum of liver disease from steatosis to nonalcoholic steatohepatitis (NASH) and cirrhosis. NAFLD is defined as fat accumulation in the liver exceeding 5% by weight, in the absense of significant alcohol consumption, steatogenic medication, or hereditary disorders (Kotronen et al, Arterioscler Thromb. Vasc. Biol. 2008, 28: 27-38).

[0004] Non-alcoholic steatohepatitis (NASH) is NAFLD with signs of inflammation and hepatic injury. NASH is defined histologically by macrovesicular steatosis, hepatocellular ballooning, and lobular inflammatory infiltrates (Sanyal, Hepatol. Res. 2011. 41: 670-4). NASH is estimated to affect 2-3% of the general population. In the presence of other pathologies, such as obesity or diabetes, the estimated prevalence increases to 7% and 62% respectively (Hashimoto et al, J. Gastroenterol. 2011. 46(1): 63-69).

[0005] PNPLA3 is a 481 amino acid member of the patatin-like phospholipase domain-containing family that is expressed in the ER and on lipid droplets. In humans, PNPLA3 is highly expressed in the liver, whereas adipose tissue expression is five-fold less (Huang et al, Proc. Natl. Acad. Sci. USA 2010. 107: 7892-7).

### SUMMARY

[0006] Certain embodiments provided herein are compounds and methods for reducing the amount or activity of PNPLA3 mRNA, and in certain embodiments, reducing the amount of PNPLA3 protein in a cell or animal. In certain embodiments, the animal has a liver disease. In certain embodiments, the disease is NASH. In certain embodiments, the disease is NAFLD. In certain embodiments, the disease is hepatic steatosis. In certain embodiments, the disease is liver cirrhosis. In certain embodiments, the disease is hepatocellular carcinoma. In certain embodiments, the disease is alcoholic liver disease. In certain embodiments, the disease is alcoholic steatohepatitis (ASH). In certain embodiments, the disease is HCV hepatitis. In certain embodiments, the disease is chronic hepatitis. In certain embodiments, the disease is hereditary hemochromatosis. In certain embodiments, the disease is primary sclerosing cholangitis. Certain compounds provided herein are directed to compounds and compositions that reduce liver damage, steatosis, liver fibrosis, liver inflammation, liver scarring or cirrhosis, liver failure, liver enlargement, elevated transaminases, or hepatic fat accumulation in an animal.

[0007] Certain embodiments provided herein are directed to potent and tolerable compounds and compositions useful for inhibiting PNPLA3 expression, which can be useful for treating, preventing, ameliorating, or slowing progression of liver diseases. Certain embodiments provided herein are directed to compounds and compositions that are more potent or have greater therapeutic value than compounds publicly disclosed.

### DETAILED DESCRIPTION

[0008] It is to be understood that both the foregoing general description and the following detailed description are exemplary and explanatory only and are not restrictive of the embodiments, as claimed. Herein, the use of the singular includes the plural unless specifically stated otherwise. As used herein, the use of “or” means “and/or” unless stated otherwise. Furthermore, the use of the term “including” as well as other forms, such as “includes” and “included”, is not limiting.

[0009] The section headings used herein are for organizational purposes only and are not to be construed as limiting the subject matter described. All documents, or portions of documents, cited in this application, including, but not limited to, patents, patent applications, articles, books, treatises, and GenBank and NCBI reference sequence records are hereby expressly incorporated by reference for the portions of the document discussed herein, as well as in their entirety.

[0010] It is understood that the sequence set forth in each SEQ ID NO in the examples contained herein is independent of any modification to a sugar moiety, an internucleoside linkage, or a nucleobase. As such, compounds defined by a SEQ ID NO may comprise, independently, one or more modifications to a sugar moiety, an internucleoside linkage, or a nucleobase. Compounds described by ION number indicate a combination of nucleobase sequence, chemical modification, and motif.

### Definitions

[0011] Unless otherwise indicated, the following terms have the following meanings:

[0012] “2′-deoxynucleoside” means a nucleoside comprising 2′-H(H) furanosyl sugar moiety, as found in naturally occurring deoxyribonucleic acids (DNA). In certain embodiments, a 2′-deoxynucleoside may comprise a modified nucleobase or may comprise an RNA nucleobase (uracil).

[0013] “2′-O-methoxyethyl” (also 2′-MOE) refers to a 2′-O(CH₂)₂-OCH₃) in the place of the 2′—OH group of a ribosyl ring. A 2′-O-methoxyethyl modified sugar is a modified sugar.

[0014] “2′-MOE nucleoside” (also 2′-O-methoxyethyl nucleoside) means a nucleoside comprising a 2′-MOE modified sugar moiety.

[0015] “2′-substituted nucleoside” or “2-modified nucleoside” means a nucleoside comprising a 2′-substituted or 2′-modified sugar moiety. As used herein, “2′-substituted” or “2-modified” in reference to a sugar moiety means a sugar moiety comprising at least one 2′-substituent group other than H or OH.

[0016] “3′ target site” refers to the nucleotide of a target nucleic acid which is complementary to the 3′-most nucleotide of a particular compound.

[0017] “5′ target site” refers to the nucleotide of a target nucleic acid which is complementary to the 5′-most nucleotide of a particular compound.

[0018] “5-methylcytosine” means a cytosine with a methyl group attached to the 5 position.

[0019] “About” means within +10% of a value. For example, if it is stated, “the compounds affected about 70% inhibition of PNPLA3”, it is implied that PNPLA3 levels are inhibited within a range of 60% and 80%.

[0020] “Administration” or “administering” refers to routes of introducing a compound or composition provided herein to an individual to perform its intended function. An example of a route of administration that can be used includes, but is not limited to parenteral administration, such as subcutaneous, intravenous, or intramuscular injection or infusion.

[0021] “Administered concomitantly” or “co-administration” means administration of two or more compounds in any manner in which the pharmacological effects of both are manifest in the patient. Concomitant administration does not require that both compounds be administered in a single pharmaceutical composition, in the same dosage form, by the same route of administration, or at the same time. The effects of both compounds need not manifest themselves at the same time. The effects need only be overlapping for a period of time and need not be coextensive. Concomitant administration or co-administration encompasses administration in parallel or sequentially.

[0022] “Amelioration” refers to an improvement or lessening of at least one indicator, sign, or symptom of an associated disease, disorder, or condition. In certain embodiments, amelioration includes a delay or slowing in the progression or severity of one or more indicators of a condition or disease. The progression or severity of indicators may be determined by subjective or objective measures, which are known to those skilled in the art.

[0023] “Animal” refers to a human or non-human animal, including, but not limited to, mice, rats, rabbits, dogs, cats, pigs, and non-human primates, including, but not limited to, monkeys and chimpanzees.

[0024] “Antisense activity” means any detectable and/or measurable activity attributable to the hybridization of an antisense compound to its target nucleic acid. In certain embodiments, antisense activity is a decrease in the amount or expression of a target nucleic acid or protein encoded by such target nucleic acid compared to target nucleic acid levels or target protein levels in the absence of the antisense compound to the target.

[0025] “Antisense compound” means a compound comprising an oligonucleotide and optionally one or more additional features, such as a conjugate group or terminal group. Examples of antisense compounds include single-stranded and double-stranded compounds, such as, oligonucleotides, ribozymes, siRNAs, shRNAs, ssRNAs, and occupancy-based compounds.

[0026] “Antisense inhibition” means reduction of target nucleic acid levels in the presence of an antisense compound complementary to a target nucleic acid compared to target nucleic acid levels in the absence of the antisense compound.

[0027] “Antisense mechanisms” are all those mechanisms involving hybridization of a compound with target nucleic acid, wherein the outcome or effect of the hybridization is either target degradation or target occupancy with concomitant stalling of the cellular machinery involving, for example, transcription or splicing.

[0028] “Antisense oligonucleotide” means an oligonucleotide having a nucleobase sequence that is complementary to a target nucleic acid or region or segment thereof. In certain embodiments, an antisense oligonucleotide is specifically hybridizable to a target nucleic acid or region or segment thereof.

[0029] “Bicyclic nucleoside” or “BNA” means a nucleoside comprising a bicyclic sugar moiety. “Bicyclic sugar” or “bicyclic sugar moiety” means a modified sugar moiety comprising two rings, wherein the second ring is formed via a bridge connecting two of the atoms in the first ring thereby forming a bicyclic structure. In certain embodiments, the first ring of the bicyclic sugar moiety is a furanosyl moiety. In certain embodiments, the bicyclic sugar moiety does not comprise a furanosyl moiety.

[0030] “Branching group” means a group of atoms having at least 3 positions that are capable of forming covalent linkages to at least 3 groups. In certain embodiments, a branching group provides a plurality of reactive sites for connecting tethered ligands to an oligonucleotide via a conjugate linker and/or a cleavable moiety.

[0031] “Cell-targeting moiety” means a conjugate group or portion of a conjugate group that is capable of binding to a particular cell type or particular cell types.

[0032] “cEt” or “constrained ethyl” means a ribosyl bicyclic sugar moiety wherein the second ring of the bicyclic sugar is formed via a bridge connecting the 4′-carbon and the 2′-carbon, wherein the bridge has the formula: 4′-CH(CH₃)—O-2′, and wherein the methyl group of the bridge is in the S configuration.

[0033] “cEt nucleoside” means a nucleoside comprising a cEt modified sugar moiety.

[0034] “Chemical modification” in a compound describes the substitutions or changes through chemical reaction, of any of the units in the compound relative to the original state of such unit. “Modified nucleoside” means a nucleoside having, independently, a modified sugar moiety and/or modified nucleobase. “Modified oligonucleotide” means an oligonucleotide comprising at least one modified internucleoside linkage, a modified sugar, and/or a modified nucleobase.

[0035] “Chemically distinct region” refers to a region of a compound that is in some way chemically different than another region of the same compound. For example, a region having 2′-O-methoxyethyl nucleotides is chemically distinct from a region having nucleotides without 2′-O-methoxyethyl modifications.

[0036] “Chimeric antisense compounds” means antisense compounds that have at least 2 chemically distinct regions, each position having a plurality of subunits.

[0037] “Cleavable bond” means any chemical bond capable of being split. In certain embodiments, a cleavable bond is selected from among: an amide, a polyamide, an ester, an ether, one or both esters of a phosphodiester, a phosphate ester, a carbamate, a di-sulfide, or a peptide.

[0038] “Cleavable moiety” means a bond or group of atoms that is cleaved under physiological conditions, for example, inside a cell, an animal, or a human.

[0039] “Complementary” in reference to an oligonucleotide means the nucleobase sequence of such oligonucleotide or one or more regions thereof matches the nucleobase sequence of another oligonucleotide or nucleic acid or one or more regions thereof when the two nucleobase sequences are aligned in opposing directions. Nucleobase matches or complementary nucleobases, as described herein, are limited to the following pairs: adenine (A) and thymine (T), adenine (A) and uracil (U), cytosine (C) and guanine (G), and 5-methyl cytosine (^{m}C) and guanine (G) unless otherwise specified. Complementary oligonucleotides and/or nucleic acids need not have nucleobase complementarity at each nucleoside and may include one or more nucleobase mismatches. By contrast, “fully complementary” or “100% complementary” in reference to oligonucleotides means that such oligonucleotides have nucleobase matches at each nucleoside without any nucleobase mismatches.

[0040] “Conjugate group” means a group of atoms that is attached to an oligonucleotide. Conjugate groups include a conjugate moiety and a conjugate linker that attaches the conjugate moiety to the oligonucleotide.

[0041] “Conjugate linker” means a group of atoms comprising at least one bond that connects a conjugate moiety to an oligonucleotide.

[0042] “Conjugate moiety” means a group of atoms that is attached to an oligonucleotide via a conjugate linker.

[0043] “Contiguous” in the context of an oligonucleotide refers to nucleosides, nucleobases, sugar moieties, or internucleoside linkages that are immediately adjacent to each other. For example, “contiguous nucleobases” means nucleobases that are immediately adjacent to each other in a sequence.

[0044] “Designing” or “Designed to” refer to the process of designing a compound that specifically hybridizes with a selected nucleic acid molecule.

[0045] “Diluent” means an ingredient in a composition that lacks pharmacological activity, but is pharmaceutically necessary or desirable. For example, the diluent in an injected composition can be a liquid, e.g. saline solution.

[0046] “Differently modified” means chemical modifications or chemical substituents that are different from one another, including absence of modifications. Thus, for example, a MOE nucleoside and an unmodified DNA nucleoside are “differently modified,” even though the DNA nucleoside is unmodified. Likewise, DNA and RNA are “differently modified,” even though both are naturally-occurring unmodified nucleosides. Nucleosides that are the same but for comprising different nucleobases are not differently modified. For example, a nucleoside comprising a 2′-OMe modified sugar and an unmodified adenine nucleobase and a nucleoside comprising a 2′-OMe modified sugar and an unmodified thymine nucleobase are not differently modified.

[0047] “Dose” means a specified quantity of a compound or pharmaceutical agent provided in a single administration, or in a specified time period. In certain embodiments, a dose may be administered in two or more boluses, tablets, or injections. For example, in certain embodiments, where subcutaneous administration is desired, the desired dose may require a volume not easily accommodated by a single injection. In such embodiments, two or more injections may be used to achieve the desired dose. In certain embodiments, a dose may be administered in two or more injections to minimize injection site reaction in an individual. In other embodiments, the compound or pharmaceutical agent is administered by infusion over an extended period of time or continuously. Doses may be stated as the amount of pharmaceutical agent per hour, day, week or month.

[0048] “Dosing regimen” is a combination of doses designed to achieve one or more desired effects.

[0049] “Double-stranded antisense compound” means an antisense compound comprising two oligomeric compounds that are complementary to each other and form a duplex, and wherein one of the two said oligomeric compounds comprises an oligonucleotide.

[0050] “Effective amount” means the amount of compound sufficient to effectuate a desired physiological outcome in an individual in need of the compound. The effective amount may vary among individuals depending on the health and physical condition of the individual to be treated, the taxonomic group of the individuals to be treated, the formulation of the composition, assessment of the individual's medical condition, and other relevant factors.

[0051] “Efficacy” means the ability to produce a desired effect.

[0052] “Expression” includes all the functions by which a gene's coded information is converted into structures present and operating in a cell. Such structures include, but are not limited to, the products of transcription and translation.

[0053] “Gapmer” means an oligonucleotide comprising an internal region having a plurality of nucleosides that support RNase H cleavage positioned between external regions having one or more nucleosides, wherein the nucleosides comprising the internal region are chemically distinct from the nucleoside or nucleosides comprising the external regions. The internal region may be referred to as the “gap” and the external regions may be referred to as the “wings.”

[0054] “Hybridization” means the annealing of oligonucleotides and/or nucleic acids. While not limited to a particular mechanism, the most common mechanism of hybridization involves hydrogen bonding, which may be Watson-Crick, Hoogsteen or reversed Hoogsteen hydrogen bonding, between complementary nucleobases. In certain embodiments, complementary nucleic acid molecules include, but are not limited to, an antisense compound and a nucleic acid target. In certain embodiments, complementary nucleic acid molecules include, but are not limited to, an oligonucleotide and a nucleic acid target.

[0055] “Immediately adjacent” means there are no intervening elements between the immediately adjacent elements of the same kind (e.g. no intervening nucleobases between the immediately adjacent nucleobases).

[0056] “Individual” means a human or non-human animal selected for treatment or therapy.

[0057] “Inhibiting the expression or activity” refers to a reduction or blockade of the expression or activity relative to the expression of activity in an untreated or control sample and does not necessarily indicate a total elimination of expression or activity.

[0058] “Internucleoside linkage” means a group or bond that forms a covalent linkage between adjacent nucleosides in an oligonucleotide. “Modified internucleoside linkage” means any internucleoside linkage other than a naturally occurring, phosphate internucleoside linkage. Non-phosphate linkages are referred to herein as modified internucleoside linkages.

[0059] “Lengthened oligonucleotides” are those that have one or more additional nucleosides relative to an oligonucleotide disclosed herein, e.g. a parent oligonucleotide.

[0060] “Linked nucleosides” means adjacent nucleosides linked together by an internucleoside linkage.

[0061] “Linker-nucleoside” means a nucleoside that links an oligonucleotide to a conjugate moiety. Linker-nucleosides are located within the conjugate linker of a compound. Linker-nucleosides are not considered part of the oligonucleotide portion of a compound even if they are contiguous with the oligonucleotide.

[0062] “Mismatch” or “non-complementary” means a nucleobase of a first oligonucleotide that is not complementary to the corresponding nucleobase of a second oligonucleotide or target nucleic acid when the first and second oligonucleotides are aligned. For example, nucleobases including but not limited to a universal nucleobase, inosine, and hypoxanthine, are capable of hybridizing with at least one nucleobase but are still mismatched or non-complementary with respect to nucleobase to which it hybridized. As another example, a nucleobase of a first oligonucleotide that is not capable of hybridizing to the corresponding nucleobase of a second oligonucleotide or target nucleic acid when the first and second oligonucleotides are aligned is a mismatch or non-complementary nucleobase.

[0063] “Modulating” refers to changing or adjusting a feature in a cell, tissue, organ or organism. For example, modulating PNPLA3 RNA can mean to increase or decrease the level of PNPLA3 RNA and/or PNPLA3 protein in a cell, tissue, organ or organism. A “modulator” effects the change in the cell, tissue, organ or organism. For example, a PNPLA3 compound can be a modulator that decreases the amount of PNPLA3 RNA and/or PNPLA3 protein in a cell, tissue, organ or organism.

[0064] “MOE” means methoxyethyl.

[0065] “Monomer” refers to a single unit of an oligomer. Monomers include, but are not limited to, nucleosides and nucleotides.

[0066] “Motif” means the pattern of unmodified and/or modified sugar moieties, nucleobases, and/or internucleoside linkages, in an oligonucleotide.

[0067] “Natural” or “naturally occurring” means found in nature.

[0068] “Non-bicyclic modified sugar” or “non-bicyclic modified sugar moiety” means a modified sugar moiety that comprises a modification, such as a substituent, that does not form a bridge between two atoms of the sugar to form a second ring.

[0069] “Nucleic acid” refers to molecules composed of monomeric nucleotides. A nucleic acid includes, but is not limited to, ribonucleic acids (RNA), deoxyribonucleic acids (DNA), single-stranded nucleic acids, and double-stranded nucleic acids.

[0070] “Nucleobase” means a heterocyclic moiety capable of pairing with a base of another nucleic acid. As used herein a “naturally occurring nucleobase” is adenine (A), thymine (T), cytosine (C), uracil (U), and guanine (G). A “modified nucleobase” is a naturally occurring nucleobase that is chemically modified. A “universal base” or “universal nucleobase” is a nucleobase other than a naturally occurring nucleobase and modified nucleobase, and is capable of pairing with any nucleobase.

[0071] “Nucleobase sequence” means the order of contiguous nucleobases in a nucleic acid or oligonucleotide independent of any sugar or internucleoside linkage.

[0072] “Nucleoside” means a compound comprising a nucleobase and a sugar moiety. The nucleobase and sugar moiety are each, independently, unmodified or modified. “Modified nucleoside” means a nucleoside comprising a modified nucleobase and/or a modified sugar moiety. Modified nucleosides include abasic nucleosides, which lack a nucleobase.

[0073] “Oligomeric compound” means a compound comprising a single oligonucleotide and optionally one or more additional features, such as a conjugate group or terminal group.

[0074] “Oligonucleotide” means a polymer of linked nucleosides each of which can be modified or unmodified, independent one from another. Unless otherwise indicated, oligonucleotides consist of 8-80 linked nucleosides. “Modified oligonucleotide” means an oligonucleotide, wherein at least one sugar, nucleobase, or internucleoside linkage is modified. “Unmodified oligonucleotide” means an oligonucleotide that does not comprise any sugar, nucleobase, or internucleoside modification.

[0075] “Parent oligonucleotide” means an oligonucleotide whose sequence is used as the basis of design for more oligonucleotides of similar sequence but with different lengths, motifs, and/or chemistries. The newly designed oligonucleotides may have the same or overlapping sequence as the parent oligonucleotide.

[0076] “Parenteral administration” means administration through injection or infusion. Parenteral administration includes subcutaneous administration, intravenous administration, intramuscular administration, intraarterial administration, intraperitoneal administration, or intracranial administration, e.g. intrathecal or intracerebroventricular administration.

[0077] “Pharmaceutically acceptable carrier or diluent” means any substance suitable for use in administering to an individual. For example, a pharmaceutically acceptable carrier can be a sterile aqueous solution, such as PBS or water-for-injection.

[0078] “Pharmaceutically acceptable salts” means physiologically and pharmaceutically acceptable salts of compounds, such as oligomeric compounds or oligonucleotides, i.e., salts that retain the desired biological activity of the parent compound and do not impart undesired toxicological effects thereto.

[0079] “Pharmaceutical agent” means a compound that provides a therapeutic benefit when administered to an individual.

[0080] “Pharmaceutical composition” means a mixture of substances suitable for administering to an individual. For example, a pharmaceutical composition may comprise one or more compounds or salt thereof and a sterile aqueous solution.

[0081] “Phosphorothioate linkage” means a modified phosphate linkage in which one of the non-bridging oxygen atoms is replaced with a sulfur atom. A phosphorothioate internucleoside linkage is a modified internucleoside linkage.

[0082] “Phosphorus moiety” means a group of atoms comprising a phosphorus atom. In certain embodiments, a phosphorus moiety comprises a mono-, di-, or tri-phosphate, or phosphorothioate.

[0083] “Portion” means a defined number of contiguous (i.e., linked) nucleobases of a nucleic acid. In certain embodiments, a portion is a defined number of contiguous nucleobases of a target nucleic acid. In certain embodiments, a portion is a defined number of contiguous nucleobases of an oligomeric compound.

[0084] “Prevent” refers to delaying or forestalling the onset, development or progression of a disease, disorder, or condition for a period of time from minutes to indefinitely.

[0085] “Prodrug” means a compound in a form outside the body which, when administered to an individual, is metabolized to another form within the body or cells thereof. In certain embodiments, the metabolized form is the active, or more active, form of the compound (e.g., drug). Typically conversion of a prodrug within the body is facilitated by the action of an enzyme(s) (e.g., endogenous or viral enzyme) or chemical(s) present in cells or tissues, and/or by physiologic conditions.

[0086] “Reduce” means to bring down to a smaller extent, size, amount, or number.

[0087] “RefSeq No.” is a unique combination of letters and numbers assigned to a sequence to indicate the sequence is for a particular target transcript (e.g., target gene). Such sequence and information about the target gene (collectively, the gene record) can be found in a genetic sequence database. Genetic sequence_databases include the NCBI Reference Sequence database, GenBank, the European Nucleotide Archive, and the DNA Data Bank of Japan (the latter three forming the International Nucleotide Sequence Database Collaboration or INSDC).

[0088] “Region” is defined as a portion of the target nucleic acid having at least one identifiable structure, function, or characteristic.

[0089] “RNAi compound” means an antisense compound that acts, at least in part, through RISC or Ago2, but not through RNase H, to modulate a target nucleic acid and/or protein encoded by a target nucleic acid. RNAi compounds include, but are not limited to double-stranded siRNA, single-stranded RNA (ssRNA), and microRNA, including microRNA mimics.

[0090] “Segments” are defined as smaller or sub-portions of regions within a nucleic acid.

[0091] “Side effects” means physiological disease and/or conditions attributable to a treatment other than the desired effects. In certain embodiments, side effects include injection site reactions, liver function test abnormalities, renal function abnormalities, liver toxicity, renal toxicity, central nervous system abnormalities, myopathies, and malaise. For example, increased aminotransferase levels in serum may indicate liver toxicity or liver function abnormality. For example, increased bilirubin may indicate liver toxicity or liver function abnormality.

[0092] “Single-stranded” in reference to a compound means the compound has only one oligonucleotide. “Self-complementary” means an oligonucleotide that at least partially hybridizes to itself. A compound consisting of one oligonucleotide, wherein the oligonucleotide of the compound is self-complementary, is a single-stranded compound. A single-stranded compound may be capable of binding to a complementary compound to form a duplex.

[0093] “Sites” are defined as unique nucleobase positions within a target nucleic acid.

[0094] “Specifically hybridizable” refers to an oligonucleotide having a sufficient degree of complementarity between the oligonucleotide and a target nucleic acid to induce a desired effect, while exhibiting minimal or no effects on non-target nucleic acids. In certain embodiments, specific hybridization occurs under physiological conditions.

[0095] “Specifically inhibit” with reference to a target nucleic acid means to reduce or block expression of the target nucleic acid while exhibiting fewer, minimal, or no effects on non-target nucleic acids. Reduction does not necessarily indicate a total elimination of the target nucleic acid's expression.

[0096] “Standard cell assay” means assay(s) described in the Examples and reasonable variations thereof.

[0097] “Standard in vivo experiment” means the procedure(s) described in the Example(s) and reasonable variations thereof.

[0098] “Stereorandom chiral center” in the context of a population of molecules of identical molecular formula means a chiral center having a random stereochemical configuration. For example, in a population of molecules comprising a stereorandom chiral center, the number of molecules having the (S) configuration of the stereorandom chiral center may be but is not necessarily the same as the number of molecules having the (R) configuration of the stereorandom chiral center. The stereochemical configuration of a chiral center is considered random when it is the result of a synthetic method that is not designed to control the stereochemical configuration. In certain embodiments, a stereorandom chiral center is a stereorandom phosphorothioate internucleoside linkage.

[0099] “Sugar moiety” means an unmodified sugar moiety or a modified sugar moiety. “Unmodified sugar moiety” or “unmodified sugar” means a 2′-OH(H) ribosyl moiety, as found in RNA (an “unmodified RNA sugar moiety”), or a 2′-H(H) moiety, as found in DNA (an “unmodified DNA sugar moiety”). “Modified sugar moiety” or “modified sugar” means a modified furanosyl sugar moiety or a sugar surrogate. “Modified furanosyl sugar moiety” means a furanosyl sugar comprising a non-hydrogen substituent in place of at least one hydrogen or hydroxyl of an unmodified sugar moiety. In certain embodiments, a modified furanosyl sugar moiety is a 2′-substituted sugar moiety. Such modified furanosyl sugar moieties include bicyclic sugars and non-bicyclic sugars.

[0100] “Sugar surrogate” means a modified sugar moiety having other than a furanosyl moiety that can link a nucleobase to another group, such as an internucleoside linkage, conjugate group, or terminal group in an oligonucleotide. Modified nucleosides comprising sugar surrogates can be incorporated into one or more positions within an oligonucleotide and such oligonucleotides are capable of hybridizing to complementary compounds or nucleic acids.

[0101] “Synergy” or “synergize” refers to an effect of a combination that is greater than additive of the effects of each component alone at the same doses.

[0102] “PNPLA3” means any nucleic acid or protein of PNPLA3. “PNPLA3 nucleic acid” means any nucleic acid encoding PNPLA3. For example, in certain embodiments, a PNPLA3 nucleic acid includes a DNA sequence encoding PNPLA3, an RNA sequence transcribed from DNA encoding PNPLA3 (including genomic DNA comprising introns and exons), and an mRNA sequence encoding PNPLA3. “PNPLA3 mRNA” means an mRNA encoding a PNPLA3 protein. The target may be referred to in either upper or lower case.

[0103] “PNPLA3 specific inhibitor” refers to any agent capable of specifically inhibiting PNPLA3 RNA and/or PNPLA3 protein expression or activity at the molecular level. For example, PNPLA3 specific inhibitors include nucleic acids (including antisense compounds), peptides, antibodies, small molecules, and other agents capable of inhibiting the expression of PNPLA3 RNA and/or PNPLA3 protein.

[0104] “Target gene” refers to a gene encoding a target.

[0105] “Targeting” means the specific hybridization of a compound to a target nucleic acid in order to induce a desired effect.

[0106] “Target nucleic acid,” “target RNA,” “target RNA transcript” and “nucleic acid target” all mean a nucleic acid capable of being targeted by compounds described herein.

[0107] “Target region” means a portion of a target nucleic acid to which one or more compounds is targeted.

[0108] “Target segment” means the sequence of nucleotides of a target nucleic acid to which a compound is targeted. “5′ target site” refers to the 5′-most nucleotide of a target segment. “3′ target site” refers to the 3′-most nucleotide of a target segment.

[0109] “Terminal group” means a chemical group or group of atoms that is covalently linked to a terminus of an oligonucleotide.

[0110] “Therapeutically effective amount” means an amount of a compound, pharmaceutical agent, or composition that provides a therapeutic benefit to an individual.

[0111] “Treat” refers to administering a compound or pharmaceutical composition to an animal in order to effect an alteration or improvement of a disease, disorder, or condition in the animal.

### Certain Embodiments

[0112] Certain embodiments provide methods, compounds and compositions for inhibiting PNPLA3 (PNPLA3) expression.

[0113] Certain embodiments provide compounds targeted to a PNPLA3 nucleic acid. In certain embodiments, the PNPLA3 nucleic acid has the sequence set forth in RefSeq or GENBANK Accession No. NM_025225.2 (incorporated by reference, disclosed herein as SEQ ID NO: 1); NC_000022.11 truncated from nucleotides 43921001 to U.S. Pat. No. 43,954,500 (incorporated by reference, disclosed herein as SEQ ID NO: 2); AK123806.1 (incorporated by reference, disclosed herein as SEQ ID NO: 3); BQ686328.1 (incorporated by reference, disclosed herein as SEQ ID NO: 4); BF762711.1 (incorporated by reference, disclosed herein as SEQ ID NO: 5); DA290491.1 (incorporated by reference, disclosed herein as SEQ ID NO: 6); and the sequences listed as SEQ ID Nos 7, 8, 9, and 10. In certain embodiments, the compound is an antisense compound or oligomeric compound. In certain embodiments, the compound is single-stranded. In certain embodiments, the compound is double-stranded.

[0114] In certain embodiments, the compound comprises a modified oligonucleotide 16 linked nucleosides in length. In certain embodiments, the compound is an antisense compound or oligomeric compound.

[0115] Certain embodiments provide a compound comprising a modified oligonucleotide 12 to 30 linked nucleosides in length and having a nucleobase sequence comprising the nucleobase sequence of any one of SEQ ID NOs: 17-2169. In certain embodiments, the compound is an antisense compound or oligomeric compound. In certain embodiments, the compound is single-stranded. In certain embodiments, the compound is double-stranded. In certain embodiments, the modified oligonucleotide is 16 to 30 linked nucleosides in length.

[0116] Certain embodiments provide a compound comprising a modified oligonucleotide consisting of the nucleobase sequence of any one of SEQ ID NOs: 17-2169. In certain embodiments, the compound is an antisense compound or oligomeric compound. In certain embodiments, the compound is single-stranded. In certain embodiments, the compound is double-stranded.

[0117] Certain embodiments provide a compound comprising a modified oligonucleotide 12 to 30 linked nucleosides in length and complementary within nucleobases 5567-5642, 5644-5731, 5567-5731, 5567-5620, 13697-13733, 20553-20676, 20664-20824, 20553-20824, and 25844-25912 of SEQ ID NO: 2, wherein said modified oligonucleotide is at least 85%, at least 90%, at least 95%, or 100% complementary to SEQ ID NO: 2. In certain embodiments, the compound is an antisense compound or oligomeric compound. In certain embodiments, the compound is single-stranded. In certain embodiments, the compound is double-stranded. In certain embodiments, the modified oligonucleotide is 16 to 30 linked nucleosides in length.

[0118] In certain embodiments, compounds target nucleotides 5567-5620 of a PNPLA3 nucleic acid. In certain embodiments, compounds target within nucleotides 5567-5642, 5644-5731, 5567-5731, 5567-5620 of a PNPLA3 nucleic acid having the nucleobase sequence of SEQ ID NO: 2. In certain embodiments, compounds have at least an 8, 9, 10, 11, 12, 13, 14, 15, or 16 contiguous nucleobase portion complementary to an equal length portion within nucleotides 5567-5642, 5644-5731, 5567-5731, 5567-5620 of a PNPLA3 nucleic acid having the nucleobase sequence of SEQ ID NO: 2. In certain embodiments, these compounds are antisense compounds, oligomeric compounds, or oligonucleotides.

[0119] In certain embodiments, a compound comprises a modified oligonucleotide 12 to 30 linked nucleosides in length and having a nucleobase sequence comprising at least an 8, 9, 10, 11, 12, 13, 14, 15, or 16 contiguous nucleobase portion any one of SEQ ID NOs: 1089, 1757, 141, 1982, 330, 1665, 408, 830, and 899. In certain embodiments, the modified oligonucleotide is 16 to 30 linked nucleosides in length.

[0120] In certain embodiments, a compound comprises a modified oligonucleotide 12 to 30 linked nucleosides in length and having a nucleobase sequence comprising any one of SEQ ID NOs: 1089, 1757, 141, 1982, 330, 1665, 408, 830, and 899. In certain embodiments, the modified oligonucleotide is 16 to 30 linked nucleosides in length.

[0121] In certain embodiments, a compound comprises a modified oligonucleotide having a nucleobase sequence consisting of any one of SEQ ID NOs: 1089, 1757, 141, 1982, 330, 1665, 408, 830, and 899.

[0122] In certain embodiments, compounds targeted to PNPLA3 is ION 975616, 994284, 975605, 994282, 975613, 975617, 975735, 975736, or 975612. Out of over 2,384 compounds that were screened as described in the Examples section below, ION 975616, 994284, 975605, 994282, 975613, 975617, 975735, 975736, and 975612 emerged as the top lead compounds.

[0123] In certain embodiments, any of the foregoing modified oligonucleotides comprises at least one modified internucleoside linkage, at least one modified sugar, and/or at least one modified nucleobase.

[0124] In certain embodiments, any of the foregoing modified oligonucleotides comprises at least one modified sugar. In certain embodiments, at least one modified sugar comprises a 2′-O-methoxyethyl group. In certain embodiments, at least one modified sugar is a bicyclic sugar, such as a 4′-CH(CH3)-O-2′ group, a 4′-CH2-O-2′ group, or a 4′-(CH2)₂-O-2′group.

[0125] In certain embodiments, the modified oligonucleotide comprises at least one modified internucleoside linkage, such as a phosphorothioate internucleoside linkage.

[0126] In certain embodiments, any of the foregoing modified oligonucleotides comprises at least one modified nucleobase, such as 5-methylcytosine.

[0127] In certain embodiments, any of the foregoing modified oligonucleotides comprises:
[0128] a gap segment consisting of linked deoxynucleosides;
[0129] a 5′ wing segment consisting of linked nucleosides; and
[0130] a 3′ wing segment consisting of linked nucleosides;
   wherein the gap segment is positioned between the 5′ wing segment and the 3′ wing segment and wherein each nucleoside of each wing segment comprises a modified sugar. In certain embodiments, the modified oligonucleotide is 12 to 30 linked nucleosides in length having a nucleobase sequence comprising the sequence recited in any one of SEQ ID NOs: 1089, 1757, 141, 1982, 330, 1665, 408, 830, and 899. In certain embodiments, the modified oligonucleotide is 16 to 30 linked nucleosides in length having a nucleobase sequence comprising the sequence recited in any one of SEQ ID NOs: 1089, 1757, 141, 1982, 330, 1665, 408, 830, and 899. In certain embodiments, the modified oligonucleotide is 16 linked nucleosides in length having a nucleobase sequence consisting of the sequence recited in any one of SEQ ID NOs: 1089, 1757, 141, 1982, 330, 1665, 408, 830, and 899.

[0131] In certain embodiments, a compound comprises or consists of a modified oligonucleotide 12-30 linked nucleobases in length having a nucleobase sequence comprising the sequence recited in any one of SEQ ID NOs: 1089, 1757, 141, 1982, 330, 1665, 408, 830, and 899, wherein the modified oligonucleotide comprises
[0132] a gap segment consisting of ten linked deoxynucleosides;
[0133] a 5′ wing segment consisting of three linked nucleosides; and
[0134] a 3′ wing segment consisting of three linked nucleosides;
   wherein the gap segment is positioned between the 5′ wing segment and the 3′ wing segment, wherein each nucleoside of each wing segment comprises a cEt sugar; wherein each internucleoside linkage is a phosphorothioate linkage and wherein each cytosine is a 5-methylcytosine. In certain embodiments, the modified oligonucleotide consists of 16-30 linked nucleosides. In certain embodiments, the modified oligonucleotide consists of 16 linked nucleosides.

[0135] In certain embodiments, a compound comprises or consists of a modified oligonucleotide, wherein the modified oligonucleotide is 16 linked nucleosides in length and consists of the sequence of SEQ ID NO: 1089, wherein the modified oligonucleotide comprises:
[0136] a gap segment consisting of ten linked deoxynucleosides;
[0137] a 5′ wing segment consisting of three linked nucleosides; and
[0138] a 3′ wing segment consisting of three linked nucleosides;
[0139] wherein the gap segment is positioned between the 5′ wing segment and the 3′ wing segment, wherein each nucleoside of each wing segment comprises a cEt sugar; wherein each internucleoside linkage is a phosphorothioate linkage; and wherein each cytosine is a 5-methylcytosine.

[0140] In certain embodiments, a compound consists of a modified oligonucleotide and a conjugate group, wherein the modified oligonucleotide is 16 linked nucleosides in length and consists of the sequence of SEQ ID NO: 1089, wherein the modified oligonucleotide comprises:
[0141] a gap segment consisting of ten linked deoxynucleosides;
[0142] a 5′ wing segment consisting of three linked nucleosides; and
[0143] a 3′ wing segment consisting of three linked nucleosides;
[0144] wherein the gap segment is positioned between the 5′ wing segment and the 3′ wing segment, wherein each nucleoside of each wing segment comprises a cEt sugar; wherein each internucleoside linkage is a phosphorothioate linkage; wherein each cytosine is a 5-methylcytosine; and wherein the conjugate group is positioned at the 5′end of the modified oligonucleotide and is

[chemical structure]

[0145] In certain embodiments, a compound comprises or consists of ION 916333 or salt thereof, having the following chemical structure (SEQ ID NO: 2173):

[chemical structure]

[0146] In certain embodiments, a compound comprises or consists of ION 975616 or salt thereof, having the following chemical structure (SEQ ID NO: 2174):

[chemical structure]

[0147] In certain embodiments, a compound comprises or consists of the sodium salt of 975616, having the following chemical structure (SEQ ID NO: 2174):

[chemical structure]

[0148] In certain embodiments, a compound comprises or consists of ION 975613 or salt thereof, having the following chemical structure (SEQ ID NO: 2176):

[chemical structure]

[0149] In certain embodiments, a compound comprises or consists of the sodium salt of 975613, having the following chemical structure (SEQ ID NO: 2176):

[chemical structure]

[0150] In certain embodiments, a compound comprises or consists of ION 975612 or salt thereof, having the following chemical structure (SEQ ID NO: 2178):

[chemical structure]

[0151] In certain embodiments, a compound comprises or consists of the sodium salt of 975612, having the following chemical structure (SEQ ID NO: 2178):

[chemical structure]

[0152] In certain embodiments, a compound comprises or consists of ION 916789 or salt thereof, having the following chemical structure (SEQ ID NO: 2177):

[chemical structure]

[0153] In certain embodiments, a compound comprises or consists of the sodium salt of 916789, having the following chemical structure (SEQ ID NO: 2177):

[chemical structure]

[0154] In certain embodiments, a compound comprises or consists of ION 916602 or salt thereof, having the following chemical structure (SEQ ID NO: 2175):

[chemical structure]

[0155] In certain embodiments, a compound comprises or consists of the sodium salt of 916602, having the following chemical structure (SEQ ID NO: 2175):

[chemical structure]

[0156] In any of the foregoing embodiments, the compound or oligonucleotide can be at least 85%, at least 90%, at least 95%, at least 98%, at least 99%, or 100% complementary to a nucleic acid encoding PNPLA3.

[0157] In any of the foregoing embodiments, the compound can be single-stranded. In certain embodiments, the compound comprises deoxyribonucleotides. In certain embodiments, the compound is double-stranded. In certain embodiments, the compound is double-stranded and comprises ribonucleotides. In any of the foregoing embodiments, the compound can be an antisense compound or oligomeric compound.

[0158] In any of the foregoing embodiments, the compound can be 8 to 80, 10 to 30, 12 to 50, 13 to 30, 13 to 50, 14 to 30, 14 to 50, 15 to 30, 15 to 50, 16 to 30, 16 to 50, 17 to 30, 17 to 50, 18 to 22, 18 to 24, 18 to 30, 18 to 50, 19 to 22, 19 to 30, 19 to 50, or 20 to 30 linked nucleosides in length. In certain embodiments, the compound comprises or consists of an oligonucleotide.

[0159] In certain embodiments, a compound comprises a modified oligonucleotide described herein and a conjugate group. In certain embodiments, the conjugate group is linked to the modified oligonucleotide at the 5′ end of the modified oligonucleotide. In certain embodiments, the conjugate group is linked to the modified oligonucleotide at the 3′ end of the modified oligonucleotide. In certain embodiments, the conjugate group comprises at least one N-Acetylgalactosamine (GalNAc), at least two N-Acetylgalactosamines (GalNAcs), or at least three N-Acetylgalactosamines (GalNAcs).

[0160] In certain embodiments, compounds or compositions provided herein comprise a pharmaceutically acceptable salt of the modified oligonucleotide. In certain embodiments, the salt is a sodium salt. In certain embodiments, the salt is a potassium salt.

[0161] In certain embodiments, the compounds or compositions as described herein are active by virtue of having at least one of an in vitro IC₅₀ of less than 2 μM, less than 1.5 μM, less than 1 μM, less than 0.9 μM, less than 0.8 μM, less than 0.7 μM, less than 0.6 μM, less than 0.5 μM, less than 0.4 μM, less than 0.3 μM, less than 0.2 μM, less than 0.1 μM, less than 0.05 μM, less than 0.04 μM, less than 0.03 μM, less than 0.02 μM, or less than 0.01 μM.

[0162] In certain embodiments, the compounds or compositions as described herein are highly tolerable as demonstrated by having at least one of an increase in alanine transaminase (ALT) or aspartate transaminase (AST) value of no more than 4 fold, 3 fold, or 2 fold over control animals, or an increase in liver, spleen, or kidney weight of no more than 30%, 20%, 15%, 12%, 10%, 5%, or 2% compared to control animals. In certain embodiments, the compounds or compositions as described herein are highly tolerable as demonstrated by having no increase of ALT or AST over control animals. In certain embodiments, the compounds or compositions as described herein are highly tolerable as demonstrated by having no increase in liver, spleen, or kidney weight over control animals.

[0163] Certain embodiments provide a composition comprising the compound of any of the aforementioned embodiments or any pharmaceutically acceptable salt thereof and at least one of a pharmaceutically acceptable carrier or diluent. In certain embodiments, the composition has a viscosity less than about 40 centipoise (cP), less than about 30 centipose (cP), less than about 20 centipose (cP), less than about 15 centipose (cP), or less than about 10 centipose (cP). In certain embodiments, the composition having any of the aforementioned viscosities comprises a compound provided herein at a concentration of about 100 mg/mL, about 125 mg/mL, about 150 mg/mL, about 175 mg/mL, about 200 mg/mL, about 225 mg/mL, about 250 mg/mL, about 275 mg/mL, or about 300 mg/mL. In certain embodiments, the composition having any of the aforementioned viscosities and/or compound concentrations has a temperature of room temperature, or about 20° C., about 21° C., about 22° C., about 23° C., about 24° C., about 25° C., about 26° C., about 27° C., about 28° C., about 29° C., or about 30° C.

### Certain Indications

[0164] Certain embodiments provided herein relate to methods of inhibiting PNPLA3 expression, which can be useful for treating, preventing, or ameliorating a disease associated with PNPLA3 in an individual, by administration of a compound that targets PNPLA3. In certain embodiments, the compound can be a PNPLA3 specific inhibitor. In certain embodiments, the compound can be an antisense compound, an oligomeric compound, or an oligonucleotide targeted to PNPLA3.

[0165] Examples of diseases associated with PNPLA3 treatable, preventable, and/or ameliorable with the methods provided herein include liver disease, NAFLD, hepatic steatosis, non-alcoholic steatohepatitis (NASH), liver cirrhosis, hepatocellular carcinoma, alcoholic liver disease, alcoholic steatohepatitis (ASH), HCV hepatitis, chronic hepatitis, hereditary hemochromatosis, or primary sclerosing cholangitis. Certain compounds provided herein are directed to compounds and compositions that reduce liver damage, steatosis, liver fibrosis, liver inflammation, liver scarring or cirrhosis, liver failure, liver enlargement, elevated transaminases, or hepatic fat accumulation in an animal.

[0166] In certain embodiments, a method of treating, preventing, or ameliorating a disease associated with PNPLA3 in an individual comprises administering to the individual a compound comprising a PNPLA3 specific inhibitor, thereby treating, preventing, or ameliorating the disease. In certain embodiments, the individual is identified as having, or at risk of having, a disease associated with PNPLA3. In certain embodiments, the disease is a liver disease. In certain embodiments, the compound comprises an antisense compound targeted to PNPLA3. In certain embodiments, the compound comprises an oligonucleotide targeted to PNPLA3. In certain embodiments, a compound comprises a modified oligonucleotide 12 to 30 linked nucleosides in length and having a nucleobase sequence comprising at least 8 contiguous nucleobases of any of the nucleobase sequences of SEQ ID NOs: 17-2169. In certain embodiments, a compound comprises a modified oligonucleotide 12 to 30 linked nucleosides in length and having a nucleobase sequence comprising the nucleobase sequence of any one of SEQ ID NOs: 17-2169. In certain embodiments, a compound comprises a modified oligonucleotide consisting of the nucleobase sequence of any one of SEQ ID NOs: 17-2169. In certain embodiments, a compound comprises a modified oligonucleotide 16 to 30 linked nucleosides in length having a nucleobase sequence comprising any one of SEQ ID NOs: 1089, 1757, 141, 1982, 330, 1665, 408, 830, and 899. In certain embodiments, a compound comprises a modified oligonucleotide having a nucleobase sequence consisting of any one of SEQ ID NOs: 1089, 1757, 141, 1982, 330, 1665, 408, 830, and 899. In certain embodiments, the compound is ION 975616, 994284, 975605, 994282, 975613, 975617, 975735, 975736, or 975612. In any of the foregoing embodiments, the compound can be single-stranded or double-stranded. In any of the foregoing embodiments, the compound can be an antisense compound or oligomeric compound. In certain embodiments, the compound is administered to the individual parenterally. In certain embodiments, administering the compound improves, preserves, or prevents liver damage, steatosis, liver fibrosis, cirrhosis, elevated transaminases, or hepatic fat accumulation in an animal.

[0167] In certain embodiments, a method of treating, preventing, or ameliorating liver damage, steatosis, liver fibrosis, liver inflammation, liver scarring or cirrhosis, liver failure, liver enlargement, elevated transaminases, or hepatic fat accumulation in an animal comprises administering to the individual a compound comprising a PNPLA3 specific inhibitor, thereby treating, preventing, or ameliorating liver damage, steatosis, liver fibrosis, liver inflammation, liver scarring or cirrhosis, liver failure, liver enlargement, elevated transaminases, or hepatic fat accumulation. In certain embodiments, the compound comprises an antisense compound targeted to PNPLA3. In certain embodiments, the compound comprises an oligonucleotide targeted to PNPLA3. In certain embodiments, a compound comprises a modified oligonucleotide 12 to 30 linked nucleosides in length and having a nucleobase sequence comprising at least 8 contiguous nucleobases of any of the nucleobase sequences of SEQ ID NOs: 17-2169. In certain embodiments, a compound comprises a modified oligonucleotide 12 to 30 linked nucleosides in length and having a nucleobase sequence comprising the nucleobase sequence of any one of SEQ ID NOs: 17-2169. In certain embodiments, a compound comprises a modified oligonucleotide consisting of the nucleobase sequence of any one of SEQ ID NOs: 17-2169. In certain embodiments, a compound comprises a modified oligonucleotide 16 to 30 linked nucleosides in length having a nucleobase sequence comprising any one of SEQ ID NOs: 1089, 1757, 141, 1982, 330, 1665, 408, 830, and 899. In certain embodiments, a compound comprises a modified oligonucleotide having a nucleobase sequence consisting of any one of SEQ ID NOs: 1089, 1757, 141, 1982, 330, 1665, 408, 830, and 899. In certain embodiments, the compound is ION 975616, 994284, 975605, 994282, 975613, 975617, 975735, 975736, or 975612. In any of the foregoing embodiments, the compound can be single-stranded or double-stranded. In any of the foregoing embodiments, the compound can be an antisense compound or oligomeric compound. In certain embodiments, the compound is administered to the individual parenterally. In certain embodiments, administering the compound improves, preserves, or prevents liver damage, steatosis, liver fibrosis, liver inflammation, liver scarring or cirrhosis, liver failure, liver enlargement, elevated transaminases, or hepatic fat accumulation. In certain embodiments, the individual is identified as having, or at risk of having, a disease associated with PNPLA3.

[0168] In certain embodiments, a method of inhibiting expression of PNPLA3 in an individual having, or at risk of having, a disease associated with PNPLA3 comprises administering to the individual a compound comprising a PNPLA3 specific inhibitor, thereby inhibiting expression of PNPLA3 in the individual. In certain embodiments, administering the compound inhibits expression of PNPLA3 in the liver. In certain embodiments, the disease is a liver disease. In certain embodiments, the individual has, or is at risk of having, NAFLD, hepatic steatosis, non-alcoholic steatohepatitis (NASH), liver cirrhosis, hepatocellular carcinoma, alcoholic liver disease, alcoholic steatohepatitis (ASH), HCV hepatitis, chronic hepatitis, hereditary hemochromatosis, or primary sclerosing cholangitis. In certain embodiments, the individual has, or is at risk of having, liver damage, steatosis, liver fibrosis, liver inflammation, liver scarring or cirrhosis, liver failure, liver enlargement, elevated transaminases, or hepatic fat accumulation. In certain embodiments, the compound comprises an antisense compound targeted to PNPLA3. In certain embodiments, the compound comprises an oligonucleotide targeted to PNPLA3. In certain embodiments, a compound comprises a modified oligonucleotide 12 to 30 linked nucleosides in length and having a nucleobase sequence comprising at least 8 contiguous nucleobases of any of the nucleobase sequences of SEQ ID NOs: 17-2169. In certain embodiments, a compound comprises a modified oligonucleotide 12 to 30 linked nucleosides in length and having a nucleobase sequence comprising the nucleobase sequence of any one of SEQ ID NOs: 17-2169. In certain embodiments, a compound comprises a modified oligonucleotide consisting of the nucleobase sequence of any one of SEQ ID NOs: 17-2169. In certain embodiments, a compound comprises a modified oligonucleotide 16 to 30 linked nucleosides in length having a nucleobase sequence comprising any one of SEQ ID NOs: 1089, 1757, 141, 1982, 330, 1665, 408, 830, and 899. In certain embodiments, a compound comprises a modified oligonucleotide having a nucleobase sequence consisting of any one of SEQ ID NOs: 1089, 1757, 141, 1982, 330, 1665, 408, 830, and 899. In certain embodiments, the compound is ION 975616, 994284, 975605, 994282, 975613, 975617, 975735, 975736, or 975612. In any of the foregoing embodiments, the compound can be single-stranded or double-stranded. In any of the foregoing embodiments, the compound can be an antisense compound or oligomeric compound. In certain embodiments, the compound is administered to the individual parenterally. In certain embodiments, administering the compound improves, preserves, or prevents liver damage, steatosis, liver fibrosis, liver inflammation, liver scarring or cirrhosis, liver failure, liver enlargement, elevated transaminases, or hepatic fat accumulation.

[0169] In certain embodiments, a method of inhibiting expression of PNPLA3 in a cell comprises contacting the cell with a compound comprising a PNPLA3 specific inhibitor, thereby inhibiting expression of PNPLA3 in the cell. In certain embodiments, the cell is a hepatocyte. In certain embodiments, the cell is in the liver. In certain embodiments, the cell is in the liver of an individual who has, or is at risk of having, liver damage, steatosis, liver fibrosis, liver inflammation, liver scarring or cirrhosis, liver failure, liver enlargement, elevated transaminases, or hepatic fat accumulation. In certain embodiments, the compound comprises an antisense compound targeted to PNPLA3. In certain embodiments, the compound comprises an oligonucleotide targeted to PNPLA3. In certain embodiments, a compound comprises a modified oligonucleotide 12 to 30 linked nucleosides in length and having a nucleobase sequence comprising at least 8 contiguous nucleobases of any of the nucleobase sequences of SEQ ID NOs: 17-2169. In certain embodiments, a compound comprises a modified oligonucleotide 12 to 30 linked nucleosides in length and having a nucleobase sequence comprising the nucleobase sequence of any one of SEQ ID NOs: 17-2169. In certain embodiments, a compound comprises a modified oligonucleotide consisting of the nucleobase sequence of any one of SEQ ID NOs: 17-2169. In certain embodiments, a compound comprises a modified oligonucleotide 16 to 30 linked nucleosides in length having a nucleobase sequence comprising any one of SEQ ID NOs: 1089, 1757, 141, 1982, 330, 1665, 408, 830, and 899. In certain embodiments, a compound comprises a modified oligonucleotide having a nucleobase sequence consisting of any one of SEQ ID NOs: 1089, 1757, 141, 1982, 330, 1665, 408, 830, and 899. In certain embodiments, the compound is ION 975616, 994284, 975605, 994282, 975613, 975617, 975735, 975736, or 975612. In any of the foregoing embodiments, the compound can be single-stranded or double-stranded. In any of the foregoing embodiments, the compound can be an antisense compound or oligomeric compound.

[0170] In certain embodiments, a method of reducing or inhibiting liver damage, steatosis, liver fibrosis, liver inflammation, liver scarring or cirrhosis, liver failure, liver enlargement, elevated transaminases, or hepatic fat accumulation in an individual having, or at risk of having, a disease associated with PNPLA3 comprises administering to the individual a compound comprising a PNPLA3 specific inhibitor, thereby reducing or inhibiting liver damage, steatosis, liver fibrosis, liver inflammation, liver scarring or cirrhosis, liver failure, liver enlargement, elevated transaminases, or hepatic fat accumulation in the individual. In certain embodiments, the individual has, or is at risk of having, NAFLD, hepatic steatosis, non-alcoholic steatohepatitis (NASH), liver cirrhosis, hepatocellular carcinoma, alcoholic liver disease, alcoholic steatohepatitis (ASH), HCV hepatitis, chronic hepatitis, hereditary hemochromatosis, or primary sclerosing cholangitis. In certain embodiments, the compound comprises an antisense compound targeted to PNPLA3. In certain embodiments, the compound comprises an oligonucleotide targeted to PNPLA3. In certain embodiments, a compound comprises a modified oligonucleotide 12 to 30 linked nucleosides in length and having a nucleobase sequence comprising at least 8 contiguous nucleobases of any of the nucleobase sequences of SEQ ID NOs: 17-2169. In certain embodiments, a compound comprises a modified oligonucleotide 12 to 30 linked nucleosides in length and having a nucleobase sequence comprising the nucleobase sequence of any one of SEQ ID NOs: 17-2169. In certain embodiments, a compound comprises a modified oligonucleotide consisting of the nucleobase sequence of any one of SEQ ID NOs: 17-2169. In certain embodiments, a compound comprises a modified oligonucleotide 16 to 30 linked nucleosides in length having a nucleobase sequence comprising any one of SEQ ID NOs: 1089, 1757, 141, 1982, 330, 1665, 408, 830, and 899. In certain embodiments, a compound comprises a modified oligonucleotide having a nucleobase sequence consisting of any one of SEQ ID NOs: 1089, 1757, 141, 1982, 330, 1665, 408, 830, and 899. In certain embodiments, the compound is ION 975616, 994284, 975605, 994282, 975613, 975617, 975735, 975736, or 975612. In any of the foregoing embodiments, the compound can be single-stranded or double-stranded. In any of the foregoing embodiments, the compound can be an antisense compound or oligomeric compound. In certain embodiments, the compound is administered to the individual parenterally. In certain embodiments, the individual is identified as having, or at risk of having, a disease associated with PNPLA3.

[0171] Certain embodiments are drawn to a compound comprising a PNPLA3 specific inhibitor for use in treating a disease associated with PNPLA3. In certain embodiments, the disease is NAFLD, hepatic steatosis, non-alcoholic steatohepatitis (NASH), liver cirrhosis, hepatocellular carcinoma, alcoholic liver disease, alcoholic steatohepatitis (ASH), HCV hepatitis, chronic hepatitis, hereditary hemochromatosis, or primary sclerosing cholangitis. In certain embodiments, the compound comprises an antisense compound targeted to PNPLA3. In certain embodiments, the compound comprises an oligonucleotide targeted to PNPLA3. In certain embodiments, a compound comprises a modified oligonucleotide 12 to 30 linked nucleosides in length and having a nucleobase sequence comprising at least 8 contiguous nucleobases of any of the nucleobase sequences of SEQ ID NOs: 17-2169. In certain embodiments, a compound comprises a modified oligonucleotide 12 to 30 linked nucleosides in length and having a nucleobase sequence comprising the nucleobase sequence of any one of SEQ ID NOs: 17-2169. In certain embodiments, a compound comprises a modified oligonucleotide consisting of the nucleobase sequence of any one of SEQ ID NOs: 17-2169. In certain embodiments, a compound comprises a modified oligonucleotide 16 to 30 linked nucleosides in length having a nucleobase sequence comprising any one of SEQ ID NOs: 1089, 1757, 141, 1982, 330, 1665, 408, 830, and 899. In certain embodiments, a compound comprises a modified oligonucleotide having a nucleobase sequence consisting of any one of SEQ ID NOs: 1089, 1757, 141, 1982, 330, 1665, 408, 830, and 899. In certain embodiments, the compound is ION 975616, 994284, 975605, 994282, 975613, 975617, 975735, 975736, or 975612. In any of the foregoing embodiments, the compound can be single-stranded or double-stranded. In any of the foregoing embodiments, the compound can be an antisense compound or oligomeric compound. In certain embodiments, the compound is administered to the individual parenterally.

[0172] Certain embodiments are drawn to a compound comprising a PNPLA3 specific inhibitor for use in reducing or inhibiting liver damage, steatosis, liver fibrosis, liver inflammation, liver scarring or cirrhosis, liver failure, liver enlargement, elevated transaminases, or hepatic fat accumulation in an individual having, or at risk of having, NAFLD, hepatic steatosis, non-alcoholic steatohepatitis (NASH), liver cirrhosis, hepatocellular carcinoma, alcoholic liver disease, alcoholic steatohepatitis (ASH), HCV hepatitis, chronic hepatitis, hereditary hemochromatosis, or primary sclerosing cholangitis. In certain embodiments, the compound comprises an antisense compound targeted to PNPLA3. In certain embodiments, the compound comprises an oligonucleotide targeted to PNPLA3. In certain embodiments, a compound comprises a modified oligonucleotide 12 to 30 linked nucleosides in length and having a nucleobase sequence comprising at least 8 contiguous nucleobases of any of the nucleobase sequences of SEQ ID NOs: 17-2169. In certain embodiments, a compound comprises a modified oligonucleotide 12 to 30 linked nucleosides in length and having a nucleobase sequence comprising the nucleobase sequence of any one of SEQ ID NOs: 17-2169. In certain embodiments, a compound comprises a modified oligonucleotide consisting of the nucleobase sequence of any one of SEQ ID NOs: 17-2169. In certain embodiments, a compound comprises a modified oligonucleotide 16 to 30 linked nucleosides in length having a nucleobase sequence comprising any one of SEQ ID NOs: 1089, 1757, 141, 1982, 330, 1665, 408, 830, and 899. In certain embodiments, a compound comprises a modified oligonucleotide having a nucleobase sequence consisting of any one of SEQ ID NOs: 1089, 1757, 141, 1982, 330, 1665, 408, 830, and 899. In certain embodiments, the compound is ION 975616, 994284, 975605, 994282, 975613, 975617, 975735, 975736, or 975612. In any of the foregoing embodiments, the compound can be single-stranded or double-stranded. In any of the foregoing embodiments, the compound can be an antisense compound or oligomeric compound.

[0173] Certain embodiments are drawn to the use of a compound comprising a PNPLA3 specific inhibitor for the manufacture or preparation of a medicament for treating a disease associated with PNPLA3. Certain embodiments are drawn to the use of a compound comprising a PNPLA3 specific inhibitor for the preparation of a medicament for treating a disease associated with PNPLA3. In certain embodiments, the disease is a liver disease. In certain embodiments, the disease is NAFLD, hepatic steatosis, non-alcoholic steatohepatitis (NASH), liver cirrhosis, hepatocellular carcinoma, alcoholic liver disease, alcoholic steatohepatitis (ASH), HCV hepatitis, chronic hepatitis, hereditary hemochromatosis, or primary sclerosing cholangitis. In certain embodiments, the compound comprises an antisense compound targeted to PNPLA3. In certain embodiments, the compound comprises an oligonucleotide targeted to PNPLA3. In certain embodiments, a compound comprises a modified oligonucleotide 12 to 30 linked nucleosides in length and having a nucleobase sequence comprising at least 8 contiguous nucleobases of any of the nucleobase sequences of SEQ ID NOs: 17-2169. In certain embodiments, a compound comprises a modified oligonucleotide 12 to 30 linked nucleosides in length and having a nucleobase sequence comprising the nucleobase sequence of any one of SEQ ID NOs: 17-2169. In certain embodiments, a compound comprises a modified oligonucleotide consisting of the nucleobase sequence of any one of SEQ ID NOs: 17-2169. In certain embodiments, a compound comprises a modified oligonucleotide 16 to 30 linked nucleosides in length having a nucleobase sequence comprising any one of SEQ ID NOs: 1089, 1757, 141, 1982, 330, 1665, 408, 830, and 899. In certain embodiments, a compound comprises a modified oligonucleotide having a nucleobase sequence consisting of any one of SEQ ID NOs: 1089, 1757, 141, 1982, 330, 1665, 408, 830, and 899. In certain embodiments, the compound is ION 975616, 994284, 975605, 994282, 975613, 975617, 975735, 975736, or 975612. In any of the foregoing embodiments, the compound can be single-stranded or double-stranded. In any of the foregoing embodiments, the compound can be an antisense compound or an oligomeric compound.

[0174] Certain embodiments are drawn to the use of a compound comprising a PNPLA3 specific inhibitor for the manufacture or preparation of a medicament for reducing or inhibiting liver damage, steatosis, liver fibrosis, liver inflammation, liver scarring or cirrhosis, liver failure, liver enlargement, elevated transaminases, or hepatic fat accumulation in an individual having, or at risk of having, a liver disease associated with PNPLA3. In certain embodiments, the liver disease is NAFLD, hepatic steatosis, non-alcoholic steatohepatitis (NASH), liver cirrhosis, hepatocellular carcinoma, alcoholic liver disease, alcoholic steatohepatitis (ASH), HCV hepatitis, chronic hepatitis, hereditary hemochromatosis, or primary sclerosing cholangitis. Certain embodiments are drawn to use of a compound comprising a PNPLA3 specific inhibitor for the preparation of a medicament for treating a disease associated with PNPLA3. In certain embodiments, the disease is NAFLD, hepatic steatosis, non-alcoholic steatohepatitis (NASH), liver cirrhosis, hepatocellular carcinoma, alcoholic liver disease, alcoholic steatohepatitis (ASH), HCV hepatitis, chronic hepatitis, hereditary hemochromatosis, or primary sclerosing cholangitis. In certain embodiments, the compound comprises an antisense compound targeted to PNPLA3. In certain embodiments, the compound comprises an oligonucleotide targeted to PNPLA3. In certain embodiments, a compound comprises a modified oligonucleotide 12 to 30 linked nucleosides in length and having a nucleobase sequence comprising at least 8 contiguous nucleobases of any of the nucleobase sequences of SEQ ID NOs: 17-2169. In certain embodiments, a compound comprises a modified oligonucleotide 12 to 30 linked nucleosides in length and having a nucleobase sequence comprising the nucleobase sequence of any one of SEQ ID NOs: 17-2169. In certain embodiments, a compound comprises a modified oligonucleotide consisting of the nucleobase sequence of any one of SEQ ID NOs: 17-2169. In certain embodiments, a compound comprises a modified oligonucleotide 16 to 30 linked nucleosides in length having a nucleobase sequence comprising any one of SEQ ID NOs: 1089, 1757, 141, 1982, 330, 1665, 408, 830, and 899. In certain embodiments, a compound comprises a modified oligonucleotide having a nucleobase sequence consisting of any one of SEQ ID NOs: 1089, 1757, 141, 1982, 330, 1665, 408, 830, and 899. In certain embodiments, the compound is ION 975616, 994284, 975605, 994282, 975613, 975617, 975735, 975736, or 975612. In any of the foregoing embodiments, the compound can be single-stranded or double-stranded. In any of the foregoing embodiments, the compound can be an antisense compound or an oligomeric compound.

[0175] In any of the foregoing methods or uses, the compound can be targeted to PNPLA3. In certain embodiments, the compound comprises or consists of a modified oligonucleotide, for example, a modified oligonucleotide 8 to 80 linked nucleosides in length, 10 to 30 linked nucleosides in length, 12 to 30 linked nucleosides in length, or 20 linked nucleosides in length. In certain embodiments, the modified oligonucleotide is at least 80%, at least 85%, at least 90%, at least 95% or 100% complementary to any of the nucleobase sequences recited in SEQ ID NOs: 1-10. In certain embodiments, the modified oligonucleotide comprises at least one modified internucleoside linkage, at least one modified sugar and/or at least one modified nucleobase.

[0176] In certain embodiments, the modified internucleoside linkage is a phosphorothioate internucleoside linkage, the modified sugar is a bicyclic sugar or a 2′-O-methoxyethyl modified sugar, and the modified nucleobase is a 5-methylcytosine. In certain embodiments, the modified oligonucleotide comprises a gap segment consisting of linked deoxynucleosides; a 5′ wing segment consisting of linked nucleosides; and a 3′ wing segment consisting of linked nucleosides, wherein the gap segment is positioned immediately adjacent to and between the 5′ wing segment and the 3′ wing segment and wherein each nucleoside of each wing segment comprises a modified sugar.

[0177] In any of the foregoing embodiments, the modified oligonucleotide is 12 to 30, 15 to 30, 15 to 25, 15 to 24, 16 to 24, 17 to 24, 18 to 24, 19 to 24, 20 to 24, 19 to 22, 20 to 22, 16 to 20, or 16 or 20 linked nucleosides in length. In certain embodiments, the modified oligonucleotide is at least 80%, at least 85%, at least 90%, at least 95% or 100% complementary to any of the nucleobase sequences recited in SEQ ID NOs: 1-10.

[0178] In any of the foregoing methods or uses, the compound comprises or consists of a modified oligonucleotide 16 to 30 linked nucleosides in length and having a nucleobase sequence comprising any one of SEQ ID NOs: 17-2169, wherein the modified oligonucleotide comprises:
[0179] a gap segment consisting of linked 2′-deoxynucleosides;
[0180] a 5′ wing segment consisting of linked nucleosides; and
[0181] a 3′ wing segment consisting of linked nucleosides;
   wherein the gap segment is positioned between the 5′ wing segment and the 3′ wing segment and wherein each nucleoside of each wing segment comprises a modified sugar.

[0182] In any of the foregoing methods or uses, the compound comprises or consists a modified oligonucleotide 16 linked nucleosides in length having a nucleobase sequence comprising the sequence recited in any one of SEQ ID NOs: 1089, 1757, 141, 1982, 330, 1665, 408, 830, and 899, wherein the modified oligonucleotide comprises
[0183] a gap segment consisting of ten linked deoxynucleosides;
[0184] a 5′ wing segment consisting of three linked nucleosides; and
[0185] a 3′ wing segment consisting of three linked nucleosides;
   wherein the gap segment is positioned between the 5′ wing segment and the 3′ wing segment, wherein each nucleoside of each wing segment comprises a cEt sugar; wherein each internucleoside linkage is a phosphorothioate linkage and wherein each cytosine is a 5-methylcytosine. In certain embodiments, the modified oligonucleotide is 16-30 linked nucleosides in length.

[0186] In certain embodiments, a compound comprises or consists of ION 916333 or salt thereof, having the following chemical structure (SEQ ID NO: 2173):

[chemical structure]

[0187] In certain embodiments, a compound comprises or consists of ION 975616 or salt thereof, having the following chemical structure (SEQ ID NO: 2174):

[chemical structure]

[0188] In certain embodiments, a compound comprises or consists of the sodium salt of 975616, having the following chemical structure (SEQ ID NO: 2174):

[chemical structure]

[0189] In certain embodiments, a compound comprises or consists of ION 975613 or salt thereof, having the following chemical structure (SEQ ID NO: 2176):

[chemical structure]

[0190] In certain embodiments, a compound comprises or consists of the sodium salt of 975613, having the following chemical structure (SEQ ID NO: 2176):

[chemical structure]

[0191] In certain embodiments, a compound comprises or consists of ION 975612 or salt thereof, having the following chemical structure (SEQ ID NO: 2178):

[chemical structure]

[0192] In certain embodiments, a compound comprises or consists of the sodium salt of 975612, having the following chemical structure (SEQ ID NO: 2178):

[chemical structure]

[0193] In certain embodiments, a compound comprises or consists of ION 916789 or salt thereof, having the following chemical structure (SEQ ID NO: 2177):

[chemical structure]

[0194] In certain embodiments, a compound comprises or consists of the sodium salt of 916789, having the following chemical structure (SEQ ID NO: 2177):

[chemical structure]

[0195] In certain embodiments, a compound comprises or consists of ION 916602 or salt thereof, having the following chemical structure (SEQ ID NO: 2175):

[chemical structure]

[0196] In certain embodiments, a compound comprises or consists of the sodium salt of 916602, having the following chemical structure (SEQ ID NO: 2175):

[chemical structure]

[0197] In any of the foregoing methods or uses, the compound can be administered parenterally. For example, in certain embodiments the compound can be administered through injection or infusion. Parenteral administration includes subcutaneous administration, intravenous administration, intramuscular administration, intraarterial administration, intraperitoneal administration, or intracranial administration, e.g. intrathecal or intracerebroventricular administration.

### Certain Compounds

[0198] In certain embodiments, compounds described herein can be antisense compounds. In certain embodiments, the antisense compound comprises or consists of an oligomeric compound. In certain embodiments, the oligomeric compound comprises a modified oligonucleotide. In certain embodiments, the modified oligonucleotide has a nucleobase sequence complementary to that of a target nucleic acid.

[0199] In certain embodiments, a compound described herein comprises or consists of a modified oligonucleotide. In certain embodiments, the modified oligonucleotide has a nucleobase sequence complementary to that of a target nucleic acid.

[0200] In certain embodiments, a compound or antisense compound is single-stranded. Such a single-stranded compound or antisense compound comprises or consists of an oligomeric compound. In certain embodiments, such an oligomeric compound comprises or consists of an oligonucleotide and optionally a conjugate group. In certain embodiments, the oligonucleotide is an antisense oligonucleotide. In certain embodiments, the oligonucleotide is modified. In certain embodiments, the oligonucleotide of a single-stranded antisense compound or oligomeric compound comprises a self-complementary nucleobase sequence.

[0201] In certain embodiments, compounds are double-stranded. Such double-stranded compounds comprise a first modified oligonucleotide having a region complementary to a target nucleic acid and a second modified oligonucleotide having a region complementary to the first modified oligonucleotide. In certain embodiments, the modified oligonucleotide is an RNA oligonucleotide. In such embodiments, the thymine nucleobase in the modified oligonucleotide is replaced by a uracil nucleobase. In certain embodiments, compound comprises a conjugate group. In certain embodiments, one of the modified oligonucleotides is conjugated. In certain embodiments, both the modified oligonucleotides are conjugated. In certain embodiments, the first modified oligonucleotide is conjugated. In certain embodiments, the second modified oligonucleotide is conjugated. In certain embodiments, the first modified oligonucleotide is 16-30 linked nucleosides in length and the second modified oligonucleotide is 16-30 linked nucleosides in length. In certain embodiments, one of the modified oligonucleotides has a nucleobase sequence comprising at least 8 contiguous nucleobases of any of SEQ ID NOs: 17-2169.

[0202] In certain embodiments, antisense compounds are double-stranded. Such double-stranded antisense compounds comprise a first oligomeric compound having a region complementary to a target nucleic acid and a second oligomeric compound having a region complementary to the first oligomeric compound. The first oligomeric compound of such double stranded antisense compounds typically comprises or consists of a modified oligonucleotide and optionally a conjugate group. The oligonucleotide of the second oligomeric compound of such a double-stranded antisense compound may be modified or unmodified. Either or both oligomeric compounds of a double-stranded antisense compound may comprise a conjugate group. The oligomeric compounds of double-stranded antisense compounds may include non-complementary overhanging nucleosides.

[0203] Examples of single-stranded and double-stranded compounds include, but are not limited to, oligonucleotides, siRNAs, microRNA targeting oligonucleotides, and single-stranded RNAi compounds, such as small hairpin RNAs (shRNAs), single-stranded siRNAs (ssRNAs), and microRNA mimics.

[0204] In certain embodiments, a compound described herein has a nucleobase sequence that, when written in the 5′ to 3′ direction, comprises the reverse complement of the target segment of a target nucleic acid to which it is targeted.

[0205] In certain embodiments, a compound described herein comprises an oligonucleotide 12 to 30 linked subunits in length. In certain embodiments, a compound described herein comprises an oligonucleotide 12 to 22 linked subunits in length. In certain embodiments, compound described herein comprises an oligonucleotide 14 to 30 linked subunits in length. In certain embodiments, compound described herein comprises an oligonucleotide 14 to 20 linked subunits in length. In certain embodiments, a compound described herein comprises an oligonucleotide 15 to 30 linked subunits in length. In certain embodiments, a compound described herein comprises an oligonucleotide 15 to 20 linked subunits in length. In certain embodiments, a compound described herein comprises an oligonucleotide 16 to 30 linked subunits in length. In certain embodiments, a compound described herein comprises an oligonucleotide 16 to 20 linked subunits in length. In certain embodiments, a compound described herein comprises an oligonucleotide 17 to 30 linked subunits in length. In certain embodiments, a compound described herein comprises an oligonucleotide 17 to 20 linked subunits in length. In certain embodiments, a compound described herein comprises an oligonucleotide 18 to 30 linked subunits in length. In certain embodiments, a compound described herein comprises an oligonucleotide 18 to 20 linked subunits in length. In certain embodiments, a compound described herein comprises an oligonucleotide 20 to 30 linked subunits in length. In other words, such oligonucleotides are 12 to 30 linked subunits, 14 to 30 linked subunits, 14 to 20 subunits, 15 to 30 subunits, 15 to 20 subunits, 16 to 30 subunits, 16 to 20 subunits, 17 to 30 subunits, 17 to 20 subunits, 18 to 30 subunits, 18 to 20 subunits, or 20 to 30 subunits in length, respectively. In certain embodiments, a compound described herein comprises an oligonucleotide 14 linked subunits in length. In certain embodiments, a compound described herein comprises an oligonucleotide 16 linked subunits in length. In certain embodiments, a compound described herein comprises an oligonucleotide 17 linked subunits in length. In certain embodiments, compound described herein comprises an oligonucleotide 18 linked subunits in length. In certain embodiments, a compound described herein comprises an oligonucleotide 19 linked subunits in length. In certain embodiments, a compound described herein comprises an oligonucleotide 20 linked subunits in length. In other embodiments, a compound described herein comprises an oligonucleotide 8 to 80, 12 to 50, 13 to 30, 13 to 50, 14 to 30, 14 to 50, 15 to 30, 15 to 50, 16 to 30, 16 to 50, 17 to 30, 17 to 50, 18 to 22, 18 to 24, 18 to 30, 18 to 50, 19 to 22, 19 to 30, 19 to 50, or 20 to 30 linked subunits. In certain such embodiments, the compound described herein comprises an oligonucleotide 8, 9, 10, 11, 12, 13, 14, 15, 16, 17, 18, 19, 20, 21, 22, 23, 24, 25, 26, 27, 28, 29, or 30 linked subunits in length, or a range defined by any two of the above values. In some embodiments the linked subunits are nucleotides, nucleosides, or nucleobases.

[0206] In certain embodiments, the compound may further comprise additional features or elements, such as a conjugate group, that are attached to the oligonucleotide. In certain embodiments, such compounds are antisense compounds. In certain embodiments, such compounds are oligomeric compounds. In embodiments where a conjugate group comprises a nucleoside (i.e. a nucleoside that links the conjugate group to the oligonucleotide), the nucleoside of the conjugate group is not counted in the length of the oligonucleotide.

[0207] In certain embodiments, compounds may be shortened or truncated. For example, a single subunit may be deleted from the 5′ end (5′ truncation), or alternatively from the 3′ end (3′ truncation). A shortened or truncated compound targeted to a PNPLA3 nucleic acid may have two subunits deleted from the 5′ end, or alternatively, may have two subunits deleted from the 3′ end of the compound. Alternatively, the deleted nucleosides may be dispersed throughout the compound.

[0208] When a single additional subunit is present in a lengthened compound, the additional subunit may be located at the 5′ or 3′ end of the compound. When two or more additional subunits are present, the added subunits may be adjacent to each other, for example, in a compound having two subunits added to the 5′ end (5′ addition), or alternatively, to the 3′ end (3′ addition) of the compound. Alternatively, the added subunits may be dispersed throughout the compound.

[0209] It is possible to increase or decrease the length of a compound, such as an oligonucleotide, and/or introduce mismatch bases without eliminating activity (Woolf et al. Proc. Natl. Acad. Sci. USA 1992, 89:7305-7309; Gautschi et al. J. Natl. Cancer Inst. March 2001, 93:463-471; Maher and Dolnick Nuc. Acid. Res. 1998, 16:3341-3358). However, seemingly small changes in oligonucleotide sequence, chemistry and motif can make large differences in one or more of the many properties required for clinical development (Seth et al. J. Med. Chem. 2009, 52, 10; Egli et al. J. Am. Chem. Soc. 2011, 133, 16642).

[0210] In certain embodiments, compounds described herein are interfering RNA compounds (RNAi), which include double-stranded RNA compounds (also referred to as short-interfering RNA or siRNA) and single-stranded RNAi compounds (or ssRNA). Such compounds work at least in part through the RISC pathway to degrade and/or sequester a target nucleic acid (thus, include microRNA/microRNA-mimic compounds). As used herein, the term siRNA is meant to be equivalent to other terms used to describe nucleic acid molecules that are capable of mediating sequence-specific RNAi, for example, short interfering RNA (siRNA), double-stranded RNA (dsRNA), micro-RNA (miRNA), short hairpin RNA (shRNA), short interfering oligonucleotide, short interfering nucleic acid, short interfering modified oligonucleotide, chemically modified siRNA, post-transcriptional gene silencing RNA (ptgsRNA), and others. In addition, as used herein, the term “RNAi” is meant to be equivalent to other terms used to describe sequence-specific RNA interference, such as post transcriptional gene silencing, translational inhibition, or epigenetics.

[0211] In certain embodiments, a compound described herein can comprise any of the oligonucleotide sequences targeted to PNPLA3 described herein. In certain embodiments, the compound can be double-stranded. In certain embodiments, the compound comprises a first strand comprising at least an 8, 9, 10, 11, 12, 13, 14, 15, or 16 contiguous nucleobase portion of any one of SEQ ID NOs: 17-2169 and a second strand. In certain embodiments, the compound comprises a first strand comprising the nucleobase sequence of any one of SEQ ID NOs: 17-2169 and a second strand. In certain embodiments, the compound comprises ribonucleotides in which the first strand has uracil (U) in place of thymine (T) in any one of SEQ ID NOs: 17-2169. In certain embodiments, the compound comprises (i) a first strand comprising a nucleobase sequence complementary to the site on PNPLA3 to which any of SEQ ID NOs: 17-2169 is targeted, and (ii) a second strand. In certain embodiments, the compound comprises one or more modified nucleotides in which the 2′ position of the sugar contains a halogen (such as fluorine group; 2′-F) or contains an alkoxy group (such as a methoxy group; 2′-OMe). In certain embodiments, the compound comprises at least one 2′-F sugar modification and at least one 2′-OMe sugar modification. In certain embodiments, the at least one 2′-F sugar modification and at least one 2′-OMe sugar modification are arranged in an alternating pattern for at least 2, 3, 4, 5, 6, 7, 8, 9, 10, 11, 12, 13, 14, 15, 16, 17, 18, 19, or 20 contiguous nucleobases along a strand of the dsRNA compound. In certain embodiments, the compound comprises one or more linkages between adjacent nucleotides other than a naturally-occurring phosphodiester linkage. Examples of such linkages include phosphoramide, phosphorothioate, and phosphorodithioate linkages. The compounds may also be chemically modified nucleic acid molecules as taught in U.S. Pat. No. 6,673,661. In other embodiments, the compound contains one or two capped strands, as disclosed, for example, by WO 00/63364, filed Apr. 19, 2000.

[0212] In certain embodiments, the first strand of the compound is an siRNA guide strand and the second strand of the compound is an siRNA passenger strand. In certain embodiments, the second strand of the compound is complementary to the first strand. In certain embodiments, each strand of the compound is 16, 17, 18, 19, 20, 21, 22, or 23 linked nucleosides in length. In certain embodiments, the first or second strand of the compound can comprise a conjugate group.

[0213] In certain embodiments, a compound described herein can comprise any of the oligonucleotide sequences targeted to PNPLA3 described herein. In certain embodiments, the compound is single stranded. In certain embodiments, such a compound is a single-stranded RNAi (ssRNAi) compound. In certain embodiments, the compound comprises at least an 8, 9, 10, 11, 12, 13, 14, 15, or 16 contiguous nucleobase portion of any one of SEQ ID NOs: 17-2169. In certain embodiments, the compound comprises the nucleobase sequence of any one of SEQ ID NOs: 17-2169. In certain embodiments, the compound comprises ribonucleotides in which uracil (U) is in place of thymine (T) in any one of SEQ ID NOs: 17-2169. In certain embodiments, the compound comprises a nucleobase sequence complementary to the site on PNPLA3 to which any of SEQ ID NOs: 17-2169 is targeted. In certain embodiments, the compound comprises one or more modified nucleotides in which the 2′ position in the sugar contains a halogen (such as fluorine group; 2′-F) or contains an alkoxy group (such as a methoxy group; 2′-OMe). In certain embodiments, the compound comprises at least one 2′-F sugar modification and at least one 2′-OMe sugar modification. In certain embodiments, the at least one 2′-F sugar modification and at least one 2′-OMe sugar modification are arranged in an alternating pattern for at least 2, 3, 4, 5, 6, 7, 8, 9, 10, 11, 12, 13, 14, 15, 16, 17, 18, 19, or 20 contiguous nucleobases along a strand of the compound. In certain embodiments, the compound comprises one or more linkages between adjacent nucleotides other than a naturally-occurring phosphodiester linkage. Examples of such linkages include phosphoramide, phosphorothioate, and phosphorodithioate linkages. The compounds may also be chemically modified nucleic acid molecules as taught in U.S. Pat. No. 6,673,661. In other embodiments, the compound contains a capped strand, as disclosed, for example, by WO 00/63364, filed Apr. 19, 2000. In certain embodiments, the compound consists of 16, 17, 18, 19, 20, 21, 22, or 23 linked nucleosides. In certain embodiments, the compound can comprise a conjugate group.

### Certain Mechanisms

[0214] In certain embodiments, compounds described herein comprise or consist of modified oligonucleotides. In certain embodiments, compounds described herein are antisense compounds. In certain embodiments, compounds comprise oligomeric compounds. In certain embodiments, compounds described herein are capable of hybridizing to a target nucleic acid, resulting in at least one antisense activity. In certain embodiments, compounds described herein selectively affect one or more target nucleic acid. Such compounds comprise a nucleobase sequence that hybridizes to one or more target nucleic acid, resulting in one or more desired antisense activity and does not hybridize to one or more non-target nucleic acid or does not hybridize to one or more non-target nucleic acid in such a way that results in a significant undesired antisense activity.

[0215] In certain antisense activities, hybridization of a compound described herein to a target nucleic acid results in recruitment of a protein that cleaves the target nucleic acid. For example, certain compounds described herein result in RNase H mediated cleavage of the target nucleic acid. RNase H is a cellular endonuclease that cleaves the RNA strand of an RNA:DNA duplex. The DNA in such an RNA:DNA duplex need not be unmodified DNA. In certain embodiments, compounds described herein are sufficiently “DNA-like” to elicit RNase H activity. Further, in certain embodiments, one or more non-DNA-like nucleoside in the gap of a gapmer is tolerated.

[0216] In certain antisense activities, compounds described herein or a portion of the compound is loaded into an RNA-induced silencing complex (RISC), ultimately resulting in cleavage of the target nucleic acid. For example, certain compounds described herein result in cleavage of the target nucleic acid by Argonaute. Compounds that are loaded into RISC are RNAi compounds. RNAi compounds may be double-stranded (siRNA) or single-stranded (ssRNA).

[0217] In certain embodiments, hybridization of compounds described herein to a target nucleic acid does not result in recruitment of a protein that cleaves that target nucleic acid. In certain such embodiments, hybridization of the compound to the target nucleic acid results in alteration of splicing of the target nucleic acid. In certain embodiments, hybridization of the compound to a target nucleic acid results in inhibition of a binding interaction between the target nucleic acid and a protein or other nucleic acid. In certain such embodiments, hybridization of the compound to a target nucleic acid results in alteration of translation of the target nucleic acid.

[0218] Antisense activities may be observed directly or indirectly. In certain embodiments, observation or detection of an antisense activity involves observation or detection of a change in an amount of a target nucleic acid or protein encoded by such target nucleic acid, a change in the ratio of splice variants of a nucleic acid or protein, and/or a phenotypic change in a cell or animal.

### Target Nucleic Acids, Target Regions and Nucleotide Sequences

[0219] In certain embodiments, compounds described herein comprise or consist of an oligonucleotide comprising a region that is complementary to a target nucleic acid. In certain embodiments, the target nucleic acid is an endogenous RNA molecule. In certain embodiments, the target nucleic acid encodes a protein. In certain such embodiments, the target nucleic acid is selected from an mRNA and a pre-mRNA, including intronic, exonic and untranslated regions. In certain embodiments, the target RNA is an mRNA. In certain embodiments, the target nucleic acid is a pre-mRNA. In certain such embodiments, the target region is entirely within an intron. In certain embodiments, the target region spans an intron/exon junction. In certain embodiments, the target region is at least 50% within an intron.

[0220] Nucleotide sequences that encode PNPLA3 include, without limitation, the following: RefSeq or GENBANK Accession Nos. NM_025225.2 (incorporated by reference, disclosed herein as SEQ ID NO: 1); GENBANK Accession No. NC_000022.11 truncated from nucleotides 43921001 to U.S. Pat. No. 43,954,500 (incorporated by reference, disclosed herein as SEQ ID NO: 2); AK123806.1 (incorporated by reference, disclosed herein as SEQ ID NO: 3); BQ686328.1 (incorporated by reference, disclosed herein as SEQ ID NO: 4); BF762711.1 (incorporated by reference, disclosed herein as SEQ ID NO: 5); DA290491.1 (incorporated by reference, disclosed herein as SEQ ID NO: 6); and the sequences listed as SEQ ID Nos. 7, 8, 9, and 10.

### Hybridization

[0221] In some embodiments, hybridization occurs between a compound disclosed herein and a PNPLA3 nucleic acid. The most common mechanism of hybridization involves hydrogen bonding (e.g., Watson-Crick, Hoogsteen or reversed Hoogsteen hydrogen bonding) between complementary nucleobases of the nucleic acid molecules.

[0222] Hybridization can occur under varying conditions. Hybridization conditions are sequence-dependent and are determined by the nature and composition of the nucleic acid molecules to be hybridized.

[0223] Methods of determining whether a sequence is specifically hybridizable to a target nucleic acid are well known in the art. In certain embodiments, the compounds provided herein are specifically hybridizable with a PNPLA3 nucleic acid.

### Complementarity

[0224] An oligonucleotide is said to be complementary to another nucleic acid when the nucleobase sequence of such oligonucleotide or one or more regions thereof matches the nucleobase sequence of another oligonucleotide or nucleic acid or one or more regions thereof when the two nucleobase sequences are aligned in opposing directions. Nucleobase matches or complementary nucleobases, as described herein, are limited to the following pairs: adenine (A) and thymine (T), adenine (A) and uracil (U), cytosine (C) and guanine (G), and 5-methyl cytosine (mC) and guanine (G), unless otherwise specified. Complementary oligonucleotides and/or nucleic acids need not have nucleobase complementarity at each nucleoside and may include one or more nucleobase mismatches. An oligonucleotide is fully complementary or 100% complementary when such oligonucleotides have nucleobase matches at each nucleoside without any nucleobase mismatches.

[0225] In certain embodiments, compounds described herein comprise or consist of modified oligonucleotides. In certain embodiments, compounds described herein are antisense compounds. In certain embodiments, compounds comprise oligomeric compounds. Non-complementary nucleobases between a compound and a PNPLA3 nucleic acid may be tolerated provided that the compound remains able to specifically hybridize to a target nucleic acid. Moreover, a compound may hybridize over one or more segments of a PNPLA3 nucleic acid such that intervening or adjacent segments are not involved in the hybridization event (e.g., a loop structure, mismatch or hairpin structure).

[0226] In certain embodiments, the compounds provided herein, or a specified portion thereof are at least, or are up to 70%, 80%, 85%, 86%, 87%, 88%, 89%, 90%, 91%, 92%, 93%, 94%, 95%, 96%, 97%, 98%, 99%, or 100% complementary to a PNPLA3 nucleic acid, a target region, target segment, or specified portion thereof. In certain embodiments, the compounds provided herein, or a specified portion thereof, are 70% to 75%, 75% to 80%, 80% to 85%, 85% to 90%, 90% to 95%, 95% to 100%, or any number in between these ranges, complementary to a PNPLA3 nucleic acid, a target region, target segment, or specified portion thereof. Percent complementarity of a compound with a target nucleic acid can be determined using routine methods.

[0227] For example, a compound in which 18 of 20 nucleobases of the compound are complementary to a target region, and would therefore specifically hybridize, would represent 90 percent complementarity. In this example, the remaining non-complementary nucleobases may be clustered or interspersed with complementary nucleobases and need not be contiguous to each other or to complementary nucleobases. As such, a compound which is 18 nucleobases in length having four non-complementary nucleobases which are flanked by two regions of complete complementarity with the target nucleic acid would have 77.8% overall complementarity with the target nucleic acid. Percent complementarity of a compound with a region of a target nucleic acid can be determined routinely using BLAST programs (basic local alignment search tools) and PowerBLAST programs known in the art (Altschul et al., J. Mol. Biol., 1990, 215, 403 410; Zhang and Madden, Genome Res., 1997, 7, 649 656). Percent homology, sequence identity or complementarity, can be determined by, for example, the Gap program (Wisconsin Sequence Analysis Package, Version 8 for Unix, Genetics Computer Group, University Research Park, Madison Wis.), using default settings, which uses the algorithm of Smith and Waterman (Adv. Appl. Math., 1981, 2, 482 489).

[0228] In certain embodiments, compounds described herein, or specified portions thereof, are fully complementary (i.e. 100% complementary) to a target nucleic acid, or specified portion thereof. For example, a compound may be fully complementary to a PNPLA3 nucleic acid, or a target region, or a target segment or target sequence thereof. As used herein, “fully complementary” means each nucleobase of a compound is complementary to the corresponding nucleobase of a target nucleic acid. For example, a 20 nucleobase compound is fully complementary to a target sequence that is 400 nucleobases long, so long as there is a corresponding 20 nucleobase portion of the target nucleic acid that is fully complementary to the compound. “Fully complementary” can also be used in reference to a specified portion of the first and/or the second nucleic acid. For example, a 20 nucleobase portion of a 30 nucleobase compound can be “fully complementary” to a target sequence that is 400 nucleobases long. The 20 nucleobase portion of the 30 nucleobase compound is fully complementary to the target sequence if the target sequence has a corresponding 20 nucleobase portion wherein each nucleobase is complementary to the 20 nucleobase portion of the compound. At the same time, the entire 30 nucleobase compound may or may not be fully complementary to the target sequence, depending on whether the remaining 10 nucleobases of the compound are also complementary to the target sequence.

[0229] In certain embodiments, compounds described herein comprise one or more mismatched nucleobases relative to the target nucleic acid. In certain such embodiments, antisense activity against the target is reduced by such mismatch, but activity against a non-target is reduced by a greater amount. Thus, in certain such embodiments, selectivity of the compound is improved. In certain embodiments, the mismatch is specifically positioned within an oligonucleotide having a gapmer motif. In certain such embodiments, the mismatch is at position 1, 2, 3, 4, 5, 6, 7, or 8 from the 5′-end of the gap region. In certain such embodiments, the mismatch is at position 9, 8, 7, 6, 5, 4, 3, 2, 1 from the 3′-end of the gap region. In certain such embodiments, the mismatch is at position 1, 2, 3, or 4 from the 5′-end of the wing region. In certain such embodiments, the mismatch is at position 4, 3, 2, or 1 from the 3′-end of the wing region. In certain embodiments, the mismatch is specifically positioned within an oligonucleotide not having a gapmer motif. In certain such embodiments, the mismatch is at position 1, 2, 3, 4, 5, 6, 7, 8, 9, 10, 11, or 12 from the 5′-end of the oligonucleotide. In certain such embodiments, the mismatch is at position, 2, 3, 4, 5, 6, 7, 8, 9, 10, 11, or 12 from the 3′-end of the oligonucleotide.

[0230] The location of a non-complementary nucleobase may be at the 5′ end or 3′ end of the compound. Alternatively, the non-complementary nucleobase or nucleobases may be at an internal position of the compound. When two or more non-complementary nucleobases are present, they may be contiguous (i.e. linked) or non-contiguous. In one embodiment, a non-complementary nucleobase is located in the wing segment of a gapmer oligonucleotide.

[0231] In certain embodiments, compounds described herein that are, or are up to 11, 12, 13, 14, 15, 16, 17, 18, 19, or 20 nucleobases in length comprise no more than 4, no more than 3, no more than 2, or no more than 1 non-complementary nucleobase(s) relative to a target nucleic acid, such as a PNPLA3 nucleic acid, or specified portion thereof.

[0232] In certain embodiments, compounds described herein that are, or are up to 11, 12, 13, 14, 15, 16, 17, 18, 19, 20, 21, 22, 23, 24, 25, 26, 27, 28, 29, or 30 nucleobases in length comprise no more than 6, no more than 5, no more than 4, no more than 3, no more than 2, or no more than 1 non-complementary nucleobase(s) relative to a target nucleic acid, such as a PNPLA3 nucleic acid, or specified portion thereof.

[0233] In certain embodiments, compounds described herein also include those which are complementary to a portion of a target nucleic acid. As used herein, “portion” refers to a defined number of contiguous (i.e. linked) nucleobases within a region or segment of a target nucleic acid. A “portion” can also refer to a defined number of contiguous nucleobases of a compound. In certain embodiments, the compounds, are complementary to at least an 8 nucleobase portion of a target segment. In certain embodiments, the compounds are complementary to at least a 9 nucleobase portion of a target segment. In certain embodiments, the compounds are complementary to at least a 10 nucleobase portion of a target segment. In certain embodiments, the compounds are complementary to at least an 11 nucleobase portion of a target segment. In certain embodiments, the compounds are complementary to at least a 12 nucleobase portion of a target segment. In certain embodiments, the compounds are complementary to at least a 13 nucleobase portion of a target segment. In certain embodiments, the compounds are complementary to at least a 14 nucleobase portion of a target segment. In certain embodiments, the compounds are complementary to at least a 15 nucleobase portion of a target segment. In certain embodiments, the compounds are complementary to at least a 16 nucleobase portion of a target segment. Also contemplated are compounds that are complementary to at least a 9, 10, 17, 18, 19, 20, or more nucleobase portion of a target segment, or a range defined by any two of these values.

### Identity

[0234] The compounds provided herein may also have a defined percent identity to a particular nucleotide sequence, SEQ ID NO, or compound represented by a specific ION number, or portion thereof. In certain embodiments, compounds described herein are antisense compounds or oligomeric compounds. In certain embodiments, compounds described herein are modified oligonucleotides. As used herein, a compound is identical to the sequence disclosed herein if it has the same nucleobase pairing ability. For example, a RNA which contains uracil in place of thymidine in a disclosed DNA sequence would be considered identical to the DNA sequence since both uracil and thymidine pair with adenine. Shortened and lengthened versions of the compounds described herein as well as compounds having non-identical bases relative to the compounds provided herein also are contemplated. The non-identical bases may be adjacent to each other or dispersed throughout the compound. Percent identity of an compound is calculated according to the number of bases that have identical base pairing relative to the sequence to which it is being compared.

[0235] In certain embodiments, compounds described herein, or portions thereof, are, or are at least, 70%, 75%, 80%, 85%, 90%, 91%, 92%, 93%, 94%, 95%, 96%, 97%, 98%, 99% or 100% identical to one or more of the compounds or SEQ ID NOs, or a portion thereof, disclosed herein. In certain embodiments, compounds described herein are about 70%, 75%, 80%, 85%, 90%, 91%, 92%, 93%, 94%, 95%, 96%, 97%, 98%, or 99% identical, or any percentage between such values, to a particular nucleotide sequence, SEQ ID NO, or compound represented by a specific ION number, or portion thereof, in which the compounds comprise an oligonucleotide having one or more mismatched nucleobases. In certain such embodiments, the mismatch is at position 1, 2, 3, 4, 5, 6, 7, 8, 9, 10, 11, or 12 from the 5′-end of the oligonucleotide. In certain such embodiments, the mismatch is at position, 2, 3, 4, 5, 6, 7, 8, 9, 10, 11, or 12 from the 3′-end of the oligonucleotide.

[0236] In certain embodiments, compounds described herein comprise or consist of antisense compounds. In certain embodiments, a portion of the antisense compound is compared to an equal length portion of the target nucleic acid. In certain embodiments, an 8, 9, 10, 11, 12, 13, 14, 15, 16, 17, 18, 19, 20, 21, 22, 23, 24, or 25 nucleobase portion is compared to an equal length portion of the target nucleic acid.

[0237] In certain embodiments, compounds described herein comprise or consist of oligonucleotides. In certain embodiments, a portion of the oligonucleotide is compared to an equal length portion of the target nucleic acid. In certain embodiments, an 8, 9, 10, 11, 12, 13, 14, 15, 16, 17, 18, 19, 20, 21, 22, 23, 24, or 25 nucleobase portion is compared to an equal length portion of the target nucleic acid.

### Certain Modified Compounds

[0238] In certain embodiments, compounds described herein comprise or consist of oligonucleotides consisting of linked nucleosides. Oligonucleotides may be unmodified oligonucleotides (RNA or DNA) or may be modified oligonucleotides. Modified oligonucleotides comprise at least one modification relative to unmodified RNA or DNA (i.e., comprise at least one modified nucleoside (comprising a modified sugar moiety and/or a modified nucleobase) and/or at least one modified internucleoside linkage).

[0239] A. Modified Nucleosides

[0240] Modified nucleosides comprise a modified sugar moiety or a modified nucleobase or both a modified sugar moiety and a modified nucleobase.

[0241] 1. Modified Sugar Moieties

[0242] In certain embodiments, sugar moieties are non-bicyclic modified sugar moieties. In certain embodiments, modified sugar moieties are bicyclic or tricyclic sugar moieties. In certain embodiments, modified sugar moieties are sugar surrogates. Such sugar surrogates may comprise one or more substitutions corresponding to those of other types of modified sugar moieties.

[0243] In certain embodiments, modified sugar moieties are non-bicyclic modified furanosyl sugar moieties comprising one or more acyclic substituent, including, but not limited, to substituents at the 2′, 4′, and/or 5′ positions. In certain embodiments, the furanosyl sugar moiety is a ribosyl sugar moiety. In certain embodiments, one or more acyclic substituent of non-bicyclic modified sugar moieties is branched. Examples of 2′-substituent groups suitable for non-bicyclic modified sugar moieties include but are not limited to: 2′-F, 2′-OCH₃ (“OMe” or “O-methyl”), and 2′-O(CH₂)₂OCH₃ (“MOE”). In certain embodiments, 2′-substituent groups are selected from among: halo, allyl, amino, azido, SH, CN, OCN, CF₃, OCF₃, O—C₁-C₁₀ alkoxy, O—C₁-C₁₀ substituted alkoxy, O—C₁-C₁₀ alkyl, O—C₁-C₁₀ substituted alkyl, S-alkyl, N(Rₘ)-alkyl, O-alkenyl, S-alkenyl, N(Rₘ)-alkenyl, O-alkynyl, S-alkynyl, N(Rₘ)-alkynyl, O-alkylenyl-O-alkyl, alkynyl, alkaryl, aralkyl, O-alkaryl, O-aralkyl, O(CH₂)₂SCH₃, O(CH₂)₂ON(Rₘ)(Rₙ) or OCH₂C(═O)—N(Rₘ)(Rₙ), where each Rₘ and Rₙ is, independently, H, an amino protecting group, or substituted or unsubstituted C₁-C₁₀ alkyl, and the 2′-substituent groups described in Cook et al., U.S. Pat. No. 6,531,584; Cook et al., U.S. Pat. No. 5,859,221; and Cook et al., U.S. Pat. No. 6,005,087. Certain embodiments of these 2′-substituent groups can be further substituted with one or more substituent groups independently selected from among: hydroxyl, amino, alkoxy, carboxy, benzyl, phenyl, nitro (NO₂), thiol, thioalkoxy, thioalkyl, halogen, alkyl, aryl, alkenyl and alkynyl. Examples of 4′-substituent groups suitable for linearly non-bicyclic modified sugar moieties include, but are not limited to, alkoxy (e.g., methoxy), alkyl, and those described in Manoharan et al., WO 2015/106128. Examples of 5′-substituent groups suitable for non-bicyclic modified sugar moieties include, but are not limited to: 5′-methyl (R or S), 5′-vinyl, and 5′-methoxy. In certain embodiments, non-bicyclic modified sugars comprise more than one non-bridging sugar substituent, for example, 2′-F-5′-methyl sugar moieties and the modified sugar moieties and modified nucleosides described in Migawa et al., WO 2008/101157 and Rajeev et al., US2013/0203836.

[0244] In certain embodiments, a 2′-substituted nucleoside or 2′-non-bicyclic modified nucleoside comprises a sugar moiety comprising a linear 2′-substituent group selected from: F, NH₂, N₃, OCF₃, OCH₃, O(CH₂)₃NH₂, CH₂CH═CH₂, OCH₂CH═CH₂, OCH₂CH₂OCH₃, O(CH₂)₂SCH₃, O(CH₂)₂ON(Rₘ)(Rₙ), O(CH₂)₂O(CH₂)₂N(CH₃)₂, and N-substituted acetamide (OCH₂C(═O)—N(Rₘ)(Rₙ)), where each Rₘ and Rₙ is, independently, H, an amino protecting group, or substituted or unsubstituted C₁-C₁₀ alkyl.

[0245] In certain embodiments, a 2′-substituted nucleoside or 2′-non-bicyclic modified nucleoside comprises a sugar moiety comprising a linear 2′-substituent group selected from: F, OCF₃, OCH₃, OCH₂CH₂OCH₃, O(CH₂)₂SCH₃, O(CH₂)₂ON(CH₃)₂, O(CH₂)₂O(CH₂)₂N(CH₃)₂, and OCH₂C(═O)—N(H)CH₃ (“NMA”).

[0246] In certain embodiments, a 2′-substituted nucleoside or 2′-non-bicyclic modified nucleoside comprises a sugar moiety comprising a linear 2′-substituent group selected from: F, OCH₃, and OCH₂CH₂OCH₃.

[0247] Nucleosides comprising modified sugar moieties, such as non-bicyclic modified sugar moieties, are referred to by the position(s) of the substitution(s) on the sugar moiety of the nucleoside. For example, nucleosides comprising 2′-substituted or 2′-modified sugar moieties are referred to as 2′-substituted nucleosides or 2′-modified nucleosides.

[0248] Certain modified sugar moieties comprise a bridging sugar substituent that forms a second ring resulting in a bicyclic sugar moiety. In certain such embodiments, the bicyclic sugar moiety comprises a bridge between the 4′ and the 2′ furanose ring atoms. In certain such embodiments, the furanose ring is a ribose ring. Examples of such 4′ to 2′ bridging sugar substituents include, but are not limited to: 4′-CH₂-2′, 4′-(CH₂)₂-2′, 4′-(CH₂)₃-2′, 4′-CH₂—O-2′ (“LNA”), 4′-CH₂—S-2′, 4′-(CH₂)₂—O-2′ (“ENA”), 4′-CH(CH₃)—O-2′ (referred to as “constrained ethyl” or “cEt” when in the S configuration), 4′-CH₂—O—CH₂-2′, 4′-CH₂—N(R)-2′, 4′-CH(CH₂OCH₃)—O-2′ (“constrained MOE” or “cMOE”) and analogs thereof (see, e.g., Seth et al., U.S. Pat. No. 7,399,845, Bhat et al., U.S. Pat. No. 7,569,686, Swayze et al., U.S. Pat. No. 7,741,457, and Swayze et al., U.S. Pat. No. 8,022,193), 4′-C(CH₃)(CH₃)—O-2′ and analogs thereof (see, e.g., Seth et al., U.S. Pat. No. 8,278,283), 4′-CH₂—N(OCH₃)-2′ and analogs thereof (see, e.g., Prakash et al., U.S. Pat. No. 8,278,425), 4′-CH₂—O—N(CH₃)-2′ (see, e.g., Allerson et al., U.S. Pat. No. 7,696,345 and Allerson et al., U.S. Pat. No. 8,124,745), 4′-CH₂—C(H)(CH₃)-2′ (see, e.g., Zhou, et al., J. Org. Chem., 2009, 74, 118-134), 4′-CH₂—C(═CH₂)-2′ and analogs thereof (see e.g., Seth et al., U.S. Pat. No. 8,278,426), 4′-C(RₐR_{b})—N(R)—O-2′, 4′-C(RₐR_{b})—O—N(R)-2′, 4′-CH₂—O—N(R)-2′, and 4′-CH₂—N(R)—O-2′, wherein each R, Rₐ, and R_{b} is, independently, H, a protecting group, or C₁-C₁₂ alkyl (see, e.g. Imanishi et al., U.S. Pat. No. 7,427,672).

[0249] In certain embodiments, such 4′ to 2′ bridges independently comprise from 1 to 4 linked groups independently selected from: —[C(Rₐ)(R_{b})]ₙ—, —[C(Rₐ)(R_{b})]ₙ—O—, —C(Rₐ)═C(R_{b})—, —C(Rₐ)═N—, —C(═NRₐ)—, —C(═O)—C(═S)—, —O—, —Si(Rₐ)₂—, —S(═O)ₓ—, and —N(Rₐ)—;
[0250] wherein:
[0251] x is 0, 1, or 2;
[0252] n is 1, 2, 3, or 4;
[0253] each Rₐ and Re is, independently, H, a protecting group, hydroxyl, C₁-C₁₂ alkyl, substituted C₁-C₁₂ alkyl, C₂-C₁₂ alkenyl, substituted C₂-C₁₂ alkenyl, C₂-C₁₂ alkynyl, substituted C₂-C₁₂ alkynyl, C₅-C₂₀ aryl, substituted C₅-C₂₀ aryl, heterocycle radical, substituted heterocycle radical, heteroaryl, substituted heteroaryl, C₅-C₇ alicyclic radical, substituted C₅-C₇ alicyclic radical, halogen, OJ₁, NJ₁J₂, SJ₁, N₃, COOJ₁, acyl (C(═O)—H), substituted acyl, CN, sulfonyl (S(═O)₂-J₁), or sulfoxyl (S(═O)-J₁); and each J₁ and J₂ is, independently, H, C₁-C₁₂ alkyl, substituted C₁-C₁₂ alkyl, C₂-C₁₂ alkenyl, substituted C₂-C₁₂ alkenyl, C₂-C₁₂ alkynyl, substituted C₂-C₁₂ alkynyl, C₅-C₂₀ aryl, substituted C₅-C₂₀ aryl, acyl (C(═O)—H), substituted acyl, a heterocycle radical, a substituted heterocycle radical, C₁-C₁₂ aminoalkyl, substituted C₁-C₁₂ aminoalkyl, or a protecting group.

[0254] Additional bicyclic sugar moieties are known in the art, see, for example: Freier et al., Nucleic Acids Research, 1997, 25(22), 4429-4443, Albaek et al., J. Org. Chem., 2006, 71, 7731-7740, Singh et al., Chem. Commun., 1998, 4, 455-456; Koshkin et al., Tetrahedron, 1998, 54, 3607-3630; Wahlestedt et al., Proc. Natl. Acad. Sci. U.S.A, 2000, 97, 5633-5638; Kumar et al., Bioorg. Med. Chem. Lett., 1998, 8, 2219-2222; Singh et al., J. Org. Chem., 1998, 63, 10035-10039; Srivastava et al., J. Am. Chem. Soc., 2007, 129, 8362-8379; Elayadi et al., Curr. Opinion Invens. Drugs, 2001, 2, 558-561; Braasch et al., Chem. Biol., 2001, 8, 1-7; Orum et al., Curr. Opinion Mol. Ther., 2001, 3, 239-243; Wengel et al., U.S. Pat. No. 7,053,207, Imanishi et al., U.S. Pat. No. 6,268,490, Imanishi et al. U.S. Pat. No. 6,770,748, Imanishi et al., U.S. RE44,779; Wengel et al., U.S. Pat. No. 6,794,499, Wengel et al., U.S. Pat. No. 6,670,461; Wengel et al., U.S. Pat. No. 7,034,133, Wengel et al., U.S. Pat. No. 8,080,644; Wengel et al., U.S. Pat. No. 8,034,909; Wengel et al., U.S. Pat. No. 8,153,365; Wengel et al., U.S. Pat. No. 7,572,582; and Ramasamy et al., U.S. Pat. No. 6,525,191, Torsten et al., WO 2004/106356, Wengel et al., WO 1999/014226; Seth et al., WO 2007/134181; Seth et al., U.S. Pat. No. 7,547,684; Seth et al., U.S. Pat. No. 7,666,854; Seth et al., U.S. Pat. No. 8,088,746; Seth et al., U.S. Pat. No. 7,750,131; Seth et al., U.S. Pat. No. 8,030,467; Seth et al., U.S. Pat. No. 8,268,980; Seth et al., U.S. Pat. No. 8,546,556; Seth et al., U.S. Pat. No. 8,530,640; Migawa et al., U.S. Pat. No. 9,012,421; Seth et al., U.S. Pat. No. 8,501,805; Allerson et al., US2008/0039618; and Migawa et al., US2015/0191727.

[0255] In certain embodiments, bicyclic sugar moieties and nucleosides incorporating such bicyclic sugar moieties are further defined by isomeric configuration. For example, an LNA nucleoside (described herein) may be in the α-L configuration or in the β-D configuration.

[chemical structure]

α-L-methyleneoxy (4′-CH₂—O-2′) or α-L-LNA bicyclic nucleosides have been incorporated into oligonucleotides that showed antisense activity (Frieden et al., Nucleic Acids Research, 2003, 21, 6365-6372). Herein, general descriptions of bicyclic nucleosides include both isomeric configurations. When the positions of specific bicyclic nucleosides (e.g., LNA or cEt) are identified in exemplified embodiments herein, they are in the β-D configuration, unless otherwise specified.

[0256] In certain embodiments, modified sugar moieties comprise one or more non-bridging sugar substituent and one or more bridging sugar substituent (e.g., 5′-substituted and 4′-2′ bridged sugars).

[0257] In certain embodiments, modified sugar moieties are sugar surrogates. In certain such embodiments, the oxygen atom of the sugar moiety is replaced, e.g., with a sulfur, carbon or nitrogen atom. In certain such embodiments, such modified sugar moieties also comprise bridging and/or non-bridging substituents as described herein. For example, certain sugar surrogates comprise a 4′-sulfur atom and a substitution at the 2′-position (see, e.g., Bhat et al., U.S. Pat. No. 7,875,733 and Bhat et al., U.S. Pat. No. 7,939,677) and/or the 5′ position.

[0258] In certain embodiments, sugar surrogates comprise rings having other than 5 atoms. For example, in certain embodiments, a sugar surrogate comprises a six-membered tetrahydropyran (“THP”). Such tetrahydropyrans may be further modified or substituted. Nucleosides comprising such modified tetrahydropyrans include, but are not limited to, hexitol nucleic acid (“HNA”), anitol nucleic acid (“ANA”), manitol nucleic acid (“MNA”) (see e.g., Leumann, CJ. Bioorg. & Med. Chem. 2002, 10, 841-854), fluoro HNA:

[chemical structure]

(“F-HNA”, see e.g., Swayze et al., U.S. Pat. No. 8,088,904; Swayze et al., U.S. Pat. No. 8,440,803; and Swayze et al., U.S. Pat. No. 9,005,906) F-HNA can also be referred to as a F-THP or 3′-fluoro tetrahydropyran, and nucleosides comprising additional modified THP compounds having the formula:

[chemical structure]

wherein, independently, for each of said modified THP nucleoside:
[0259] Bx is a nucleobase moiety;
[0260] T₃ and T₄ are each, independently, an internucleoside linking group linking the modified THP nucleoside to the remainder of an oligonucleotide or one of T₃ and T₄ is an internucleoside linking group linking the modified THP nucleoside to the remainder of an oligonucleotide and the other of T₃ and T₄ is H, a hydroxyl protecting group, a linked conjugate group, or a 5′ or 3′-terminal group; q₁, q₂, q₃, q₄, q₅, q₆ and q₇ are each, independently, H, C₁-C₆ alkyl, substituted C₁-C₆ alkyl, C₂-C₆ alkenyl, substituted C₂-C₆ alkenyl, C₂-C₆ alkynyl, or substituted C₂-C₆ alkynyl; and each of R₁ and R₂ is independently selected from among: hydrogen, halogen, substituted or unsubstituted alkoxy, NJ₁J₂, SJ₁, N₃, OC(═X)J₁, OC(═X)NJ₁J₂, NJ₃C(═X)NJ₁J₂, and CN, wherein X is O, S or NJ₁, and each J₁, J₂, and J₃ is, independently, H or C₁-C₆ alkyl.

[0261] In certain embodiments, modified THP nucleosides are provided wherein q₁, q₂, q₃, q₄, q₅, q₆ and q₇ are each H. In certain embodiments, at least one of q₁, q₂, q₃, q₄, q₅, q₆ and q₇ is other than H. In certain embodiments, at least one of q₁, q₂, q₃, q₄, q₅, q₆ and q₇ is methyl. In certain embodiments, modified THP nucleosides are provided wherein one of R₁ and R₂ is F. In certain embodiments, R₁ is F and R₂ is H, in certain embodiments, R₁ is methoxy and R₂ is H, and in certain embodiments, R₁ is methoxyethoxy and R₂ is H.

[0262] In certain embodiments, sugar surrogates comprise rings having more than 5 atoms and more than one heteroatom. For example, nucleosides comprising morpholino sugar moieties and their use in oligonucleotides have been reported (see, e.g., Braasch et al., Biochemistry, 2002, 41, 4503-4510 and Summerton et al., U.S. Pat. No. 5,698,685; Summerton et al., U.S. Pat. No. 5,166,315; Summerton et al., U.S. Pat. No. 5,185,444; and Summerton et al., U.S. Pat. No. 5,034,506). As used here, the term “morpholino” means a sugar surrogate having the following structure:

[chemical structure]

In certain embodiments, morpholinos may be modified, for example, by adding or altering various substituent groups from the above morpholino structure. Such sugar surrogates are referred to herein as “modified morpholinos.”

[0263] In certain embodiments, sugar surrogates comprise acyclic moieties. Examples of nucleosides and oligonucleotides comprising such acyclic sugar surrogates include, but are not limited to: peptide nucleic acid (“PNA”), acyclic butyl nucleic acid (see, e.g., Kumar et al., Org. Biomol. Chem., 2013, 11, 5853-5865), and nucleosides and oligonucleotides described in Manoharan et al., US2013/130378.

[0264] Many other bicyclic and tricyclic sugar and sugar surrogate ring systems are known in the art that can be used in modified nucleosides.

[0265] 2. Modified Nucleobases

[0266] Nucleobase (or base) modifications or substitutions are structurally distinguishable from, yet functionally interchangeable with, naturally occurring or synthetic unmodified nucleobases. Both natural and modified nucleobases are capable of participating in hydrogen bonding. Such nucleobase modifications can impart nuclease stability, binding affinity or some other beneficial biological property to antisense compounds.

[0267] In certain embodiments, compounds described herein comprise modified oligonucleotides. In certain embodiments, modified oligonucleotides comprise one or more nucleoside comprising an unmodified nucleobase. In certain embodiments, modified oligonucleotides comprise one or more nucleoside comprising a modified nucleobase. In certain embodiments, modified oligonucleotides comprise one or more nucleosides that does not comprise a nucleobase, referred to as an abasic nucleoside.

[0268] In certain embodiments, modified nucleobases are selected from: 5-substituted pyrimidines, 6-azapyrimidines, alkyl or alkynyl substituted pyrimidines, alkyl substituted purines, and N-2, N-6 and 0-6 substituted purines. In certain embodiments, modified nucleobases are selected from: 2-aminopropyladenine, 5-hydroxymethyl cytosine, 5-methylcytosine, xanthine, hypoxanthine, 2-aminoadenine, 6-N-methylguanine, 6-N-methyladenine, 2-propyladenine, 2-thiouracil, 2-thiothymine and 2-thiocytosine, 5-propynyl (C═C—CH₃) uracil, 5-propynylcytosine, 6-azouracil, 6-azocytosine, 6-azothymine, 5-ribosyluracil (pseudouracil), 4-thiouracil, 8-halo, 8-amino, 8-thiol, 8-thioalkyl, 8-hydroxyl, 8-aza and other 8-substituted purines, 5-halo, particularly, 5-bromo, 5-trifluoromethyl, 5-halouracil, and 5-halocytosine, 7-methylguanine, 7-methyladenine, 2-F-adenine, 2-aminoadenine, 7-deazaguanine, 7-deazaadenine, 3-deazaguanine, 3-deazaadenine, 6-N-benzoyladenine, 2-N-isobutyrylguanine, 4-N-benzoylcytosine, 4-N-benzoyluracil, 5-methyl 4-N-benzoylcytosine, 5-methyl 4-N-benzoyluracil, universal bases, hydrophobic bases, promiscuous bases, size-expanded bases, and fluorinated bases. Further modified nucleobases include tricyclic pyrimidines, such as 1,3-diazaphenoxazine-2-one, 1,3-diazaphenothiazine-2-one, and 9-(2-aminoethoxy)-1,3-diazaphenoxazine-2-one (G-clamp). Modified nucleobases may also include those in which the purine or pyrimidine base is replaced with other heterocycles, for example, 7-deaza-adenine, 7-deazaguanosine, 2-aminopyridine and 2-pyridone. Further nucleobases include those disclosed in Merigan et al., U.S. Pat. No. 3,687,808, those disclosed in The Concise Encyclopedia Of Polymer Science And Engineering, Kroschwitz, J. I., Ed., John Wiley & Sons, 1990, 858-859; Englisch et al., Angewandte Chemie, International Edition, 1991, 30, 613; Sanghvi, Y. S., Chapter 15, Antisense Research and Applications, Crooke, S. T. and Lebleu, B., Eds., CRC Press, 1993, 273-288; and those disclosed in Chapters 6 and 15, Antisense Drug Technology, Crooke S. T., Ed., CRC Press, 2008, 163-166 and 442-443.

[0269] Publications that teach the preparation of certain of the above noted modified nucleobases, as well as other modified nucleobases include without limitation, Manoharan et al., US2003/0158403, Manoharan et al., US2003/0175906; Dinh et al., U.S. Pat. No. 4,845,205; Spielvogel et al., U.S. Pat. No. 5,130,302; Rogers et al., U.S. Pat. No. 5,134,066; Bischofberger et al., U.S. Pat. No. 5,175,273; Urdea et al., U.S. Pat. No. 5,367,066; Benner et al., U.S. Pat. No. 5,432,272; Matteucci et al., U.S. Pat. No. 5,434,257; Gmeiner et al., U.S. Pat. No. 5,457,187; Cook et al., U.S. Pat. No. 5,459,255; Froehler et al., U.S. Pat. No. 5,484,908; Matteucci et al., U.S. Pat. No. 5,502,177; Hawkins et al., U.S. Pat. No. 5,525,711; Haralambidis et al., U.S. Pat. No. 5,552,540; Cook et al., U.S. Pat. No. 5,587,469; Froehler et al., U.S. Pat. No. 5,594,121; Switzer et al., U.S. Pat. No. 5,596,091; Cook et al., U.S. Pat. No. 5,614,617; Froehler et al., U.S. Pat. No. 5,645,985; Cook et al., U.S. Pat. No. 5,681,941; Cook et al., U.S. Pat. No. 5,811,534; Cook et al., U.S. Pat. No. 5,750,692; Cook et al., U.S. Pat. No. 5,948,903; Cook et al., U.S. Pat. No. 5,587,470; Cook et al., U.S. Pat. No. 5,457,191; Matteucci et al., U.S. Pat. No. 5,763,588; Froehler et al., U.S. Pat. No. 5,830,653; Cook et al., U.S. Pat. No. 5,808,027; Cook et al., U.S. Pat. No. 6,166,199; and Matteucci et al., U.S. Pat. No. 6,005,096.

[0270] In certain embodiments, compounds targeted to a PNPLA3 nucleic acid comprise one or more modified nucleobases. In certain embodiments, the modified nucleobase is 5-methylcytosine. In certain embodiments, each cytosine is a 5-methylcytosine.

[0271] Modified Internucleoside Linkages

[0272] The naturally occurring internucleoside linkage of RNA and DNA is a 3′ to 5′ phosphodiester linkage. In certain embodiments, compounds described herein having one or more modified, i.e. non-naturally occurring, internucleoside linkages are often selected over compounds having naturally occurring internucleoside linkages because of desirable properties such as, for example, enhanced cellular uptake, enhanced affinity for target nucleic acids, and increased stability in the presence of nucleases.

[0273] Representative internucleoside linkages having a chiral center include but are not limited to alkylphosphonates and phosphorothioates. Modified oligonucleotides comprising internucleoside linkages having a chiral center can be prepared as populations of modified oligonucleotides comprising stereorandom internucleoside linkages, or as populations of modified oligonucleotides comprising phosphorothioate linkages in particular stereochemical configurations. In certain embodiments, populations of modified oligonucleotides comprise phosphorothioate internucleoside linkages wherein all of the phosphorothioate internucleoside linkages are stereorandom. Such modified oligonucleotides can be generated using synthetic methods that result in random selection of the stereochemical configuration of each phosphorothioate linkage. Nonetheless, as is well understood by those of skill in the art, each individual phosphorothioate of each individual oligonucleotide molecule has a defined stereoconfiguration. In certain embodiments, populations of modified oligonucleotides are enriched for modified oligonucleotides comprising one or more particular phosphorothioate internucleoside linkages in a particular, independently selected stereochemical configuration. In certain embodiments, the particular configuration of the particular phosphorothioate linkage is present in at least 65% of the molecules in the population. In certain embodiments, the particular configuration of the particular phosphorothioate linkage is present in at least 70% of the molecules in the population. In certain embodiments, the particular configuration of the particular phosphorothioate linkage is present in at least 80% of the molecules in the population. In certain embodiments, the particular configuration of the particular phosphorothioate linkage is present in at least 90% of the molecules in the population. In certain embodiments, the particular configuration of the particular phosphorothioate linkage is present in at least 99% of the molecules in the population. Such chirally enriched populations of modified oligonucleotides can be generated using synthetic methods known in the art, e.g., methods described in Oka et al., JACS 125, 8307 (2003), Wan et al. Nuc. Acid. Res. 42, 13456 (2014), and WO 2017/015555. In certain embodiments, a population of modified oligonucleotides is enriched for modified oligonucleotides having at least one indicated phosphorothioate in the (Sp) configuration. In certain embodiments, a population of modified oligonucleotides is enriched for modified oligonucleotides having at least one phosphorothioate in the (Rp) configuration. In certain embodiments, modified oligonucleotides comprising (Rp) and/or (Sp) phosphorothioates comprise one or more of the following formulas, respectively, wherein “B” indicates a nucleobase:

[chemical structure]

Unless otherwise indicated, chiral internucleoside linkages of modified oligonucleotides described herein can be stereorandom or in a particular stereochemical configuration.

[0274] In certain embodiments, compounds targeted to a PNPLA3 nucleic acid comprise one or more modified internucleoside linkages. In certain embodiments, the modified internucleoside linkages are phosphorothioate linkages. In certain embodiments, each internucleoside linkage of an antisense compound is a phosphorothioate internucleoside linkage.

[0275] In certain embodiments, compounds described herein comprise oligonucleotides. Oligonucleotides having modified internucleoside linkages include internucleoside linkages that retain a phosphorus atom as well as internucleoside linkages that do not have a phosphorus atom. Representative phosphorus containing internucleoside linkages include, but are not limited to, phosphodiesters, phosphotriesters, methylphosphonates, phosphoramidate, and phosphorothioates. Methods of preparation of phosphorous-containing and non-phosphorous-containing linkages are well known.

[0276] In certain embodiments, nucleosides of modified oligonucleotides may be linked together using any internucleoside linkage. The two main classes of internucleoside linking groups are defined by the presence or absence of a phosphorus atom. Representative phosphorus-containing internucleoside linkages include, but are not limited to, phosphates, which contain a phosphodiester bond (“P═O”) (also referred to as unmodified or naturally occurring linkages), phosphotriesters, methylphosphonates, phosphoramidates, and phosphorothioates (“P═S”), and phosphorodithioates (“HS—P═S”). Representative non-phosphorus containing internucleoside linking groups include, but are not limited to, methylenemethylimino (—CH₂—N(CH₃)—O—CH₂), thiodiester, thionocarbamate (—O—C(═O)(NH)—S—); siloxane (—O—SiH₂—O—); and N,N′-dimethylhydrazine (—CH₂—N(CH₃)—N(CH₃)—). Modified internucleoside linkages, compared to naturally occurring phosphate linkages, can be used to alter, typically increase, nuclease resistance of the oligonucleotide. In certain embodiments, internucleoside linkages having a chiral atom can be prepared as a racemic mixture, or as separate enantiomers. Representative chiral internucleoside linkages include, but are not limited to, alkylphosphonates and phosphorothioates. Methods of preparation of phosphorous-containing and non-phosphorous-containing internucleoside linkages are well known to those skilled in the art.

[0277] Neutral internucleoside linkages include, without limitation, phosphotriesters, methylphosphonates, MMI (3′-CH₂—N(CH₃)—O-5′), amide-3 (3′-CH₂—C(═O)—N(H)-5′), amide-4 (3′-CH₂—N(H)—C(═O)-5′), formacetal (3′-O—CH₂—O-5′), methoxypropyl, and thioformacetal (3′-S—CH₂—O-5′). Further neutral internucleoside linkages include nonionic linkages comprising siloxane (dialkylsiloxane), carboxylate ester, carboxamide, sulfide, sulfonate ester and amides (See, for example: Carbohydrate Modifications in Antisense Research; Y. S. Sanghvi and P. D. Cook, Eds., ACS Symposium Series 580; Chapters 3 and 4, 40-65). Further neutral internucleoside linkages include nonionic linkages comprising mixed N, O, S and CH₂ component parts.

[0278] In certain embodiments, oligonucleotides comprise modified internucleoside linkages arranged along the oligonucleotide or region thereof in a defined pattern or modified internucleoside linkage motif. In certain embodiments, internucleoside linkages are arranged in a gapped motif. In such embodiments, the internucleoside linkages in each of two wing regions are different from the internucleoside linkages in the gap region. In certain embodiments, the internucleoside linkages in the wings are phosphodiester and the internucleoside linkages in the gap are phosphorothioate. The nucleoside motif is independently selected, so such oligonucleotides having a gapped internucleoside linkage motif may or may not have a gapped nucleoside motif and, if it does have a gapped nucleoside motif, the wing and gap lengths may or may not be the same.

[0279] In certain embodiments, oligonucleotides comprise a region having an alternating internucleoside linkage motif. In certain embodiments, oligonucleotides comprise a region of uniformly modified internucleoside linkages. In certain such embodiments, the oligonucleotide comprises a region that is uniformly linked by phosphorothioate internucleoside linkages. In certain embodiments, the oligonucleotide is uniformly linked by phosphorothioate. In certain embodiments, each internucleoside linkage of the oligonucleotide is selected from phosphodiester and phosphorothioate. In certain embodiments, each internucleoside linkage of the oligonucleotide is selected from phosphodiester and phosphorothioate and at least one internucleoside linkage is phosphorothioate.

[0280] In certain embodiments, the oligonucleotide comprises at least 6 phosphorothioate internucleoside linkages. In certain embodiments, the oligonucleotide comprises at least 8 phosphorothioate internucleoside linkages. In certain embodiments, the oligonucleotide comprises at least 10 phosphorothioate internucleoside linkages. In certain embodiments, the oligonucleotide comprises at least one block of at least 6 consecutive phosphorothioate internucleoside linkages. In certain embodiments, the oligonucleotide comprises at least one block of at least 8 consecutive phosphorothioate internucleoside linkages. In certain embodiments, the oligonucleotide comprises at least one block of at least 10 consecutive phosphorothioate internucleoside linkages. In certain embodiments, the oligonucleotide comprises at least block of at least one 12 consecutive phosphorothioate internucleoside linkages. In certain such embodiments, at least one such block is located at the 3′ end of the oligonucleotide. In certain such embodiments, at least one such block is located within 3 nucleosides of the 3′ end of the oligonucleotide.

[0281] In certain embodiments, oligonucleotides comprise one or more methylphosphonate linkages. In certain embodiments, oligonucleotides having a gapmer nucleoside motif comprise a linkage motif comprising all phosphorothioate linkages except for one or two methylphosphonate linkages. In certain embodiments, one methylphosphonate linkage is in the central gap of an oligonucleotide having a gapmer nucleoside motif.

[0282] In certain embodiments, it is desirable to arrange the number of phosphorothioate internucleoside linkages and phosphodiester internucleoside linkages to maintain nuclease resistance. In certain embodiments, it is desirable to arrange the number and position of phosphorothioate internucleoside linkages and the number and position of phosphodiester internucleoside linkages to maintain nuclease resistance. In certain embodiments, the number of phosphorothioate internucleoside linkages may be decreased and the number of phosphodiester internucleoside linkages may be increased. In certain embodiments, the number of phosphorothioate internucleoside linkages may be decreased and the number of phosphodiester internucleoside linkages may be increased while still maintaining nuclease resistance. In certain embodiments, it is desirable to decrease the number of phosphorothioate internucleoside linkages while retaining nuclease resistance. In certain embodiments, it is desirable to increase the number of phosphodiester internucleoside linkages while retaining nuclease resistance.

[0283] 3. Certain Motifs

[0284] In certain embodiments, compounds described herein comprise oligonucleotides. Oligonucleotides can have a motif, e.g. a pattern of unmodified and/or modified sugar moieties, nucleobases, and/or internucleoside linkages. In certain embodiments, modified oligonucleotides comprise one or more modified nucleosides comprising a modified sugar. In certain embodiments, modified oligonucleotides comprise one or more modified nucleosides comprising a modified nucleobase. In certain embodiments, modified oligonucleotides comprise one or more modified internucleoside linkage. In such embodiments, the modified, unmodified, and differently modified sugar moieties, nucleobases, and/or internucleoside linkages of a modified oligonucleotide define a pattern or motif. In certain embodiments, the patterns of sugar moieties, nucleobases, and internucleoside linkages are each independent of one another. Thus, a modified oligonucleotide may be described by its sugar motif, nucleobase motif and/or internucleoside linkage motif (as used herein, nucleobase motif describes the modifications to the nucleobases independent of the sequence of nucleobases).

[0285] a. Certain Sugar Motifs

[0286] In certain embodiments, compounds described herein comprise oligonucleotides. In certain embodiments, oligonucleotides comprise one or more type of modified sugar and/or unmodified sugar moiety arranged along the oligonucleotide or region thereof in a defined pattern or sugar motif. In certain instances, such sugar motifs include, but are not limited to, any of the sugar modifications discussed herein.

[0287] In certain embodiments, modified oligonucleotides comprise or consist of a region having a gapmer motif, which comprises two external regions or “wings” and a central or internal region or “gap”. The three regions of a gapmer motif (the 5′-wing, the gap, and the 3′-wing) form a contiguous sequence of nucleosides, wherein at least some of the sugar moieties of the nucleosides of each of the wings differ from at least some of the sugar moieties of the nucleosides of the gap. Specifically, at least the sugar moieties of the nucleosides of each wing that are closest to the gap (the 3′-most nucleoside of the 5′-wing and the 5′-most nucleoside of the 3′-wing) differ from the sugar moiety of the neighboring gap nucleosides, thus defining the boundary between the wings and the gap (i.e., the wing/gap junction). In certain embodiments, the sugar moieties within the gap are the same as one another. In certain embodiments, the gap includes one or more nucleosides having a sugar moiety that differs from the sugar moiety of one or more other nucleosides of the gap. In certain embodiments, the sugar motifs of the two wings are the same as one another (symmetric gapmer). In certain embodiments, the sugar motif of the 5′-wing differs from the sugar motif of the 3′-wing (asymmetric gapmer).

[0288] In certain embodiments, the wings of a gapmer comprise 1-5 nucleosides. In certain embodiments, the wings of a gapmer comprise 2-5 nucleosides. In certain embodiments, the wings of a gapmer comprise 3-5 nucleosides. In certain embodiments, the nucleosides of a gapmer are all modified nucleosides.

[0289] In certain embodiments, the gap of a gapmer comprises 7-12 nucleosides. In certain embodiments, the gap of a gapmer comprises 7-10 nucleosides. In certain embodiments, the gap of a gapmer comprises 8-10 nucleosides. In certain embodiments, the gap of a gapmer comprises 10 nucleosides. In certain embodiments, each nucleoside of the gap of a gapmer is an unmodified 2′-deoxy nucleoside.

[0290] In certain embodiments, the gapmer is a deoxy gapmer. In such embodiments, the nucleosides on the gap side of each wing/gap junction are unmodified 2′-deoxy nucleosides and the nucleosides on the wing sides of each wing/gap junction are modified nucleosides. In certain such embodiments, each nucleoside of the gap is an unmodified 2′-deoxy nucleoside. In certain such embodiments, each nucleoside of each wing is a modified nucleoside.

[0291] In certain embodiments, a modified oligonucleotide has a fully modified sugar motif wherein each nucleoside of the modified oligonucleotide comprises a modified sugar moiety. In certain embodiments, modified oligonucleotides comprise or consist of a region having a fully modified sugar motif wherein each nucleoside of the region comprises a modified sugar moiety. In certain embodiments, modified oligonucleotides comprise or consist of a region having a fully modified sugar motif, wherein each nucleoside within the fully modified region comprises the same modified sugar moiety, referred to herein as a uniformly modified sugar motif. In certain embodiments, a fully modified oligonucleotide is a uniformly modified oligonucleotide. In certain embodiments, each nucleoside of a uniformly modified comprises the same 2′-modification.

[0292] b. Certain Nucleobase Motifs

[0293] In certain embodiments, compounds described herein comprise oligonucleotides. In certain embodiments, oligonucleotides comprise modified and/or unmodified nucleobases arranged along the oligonucleotide or region thereof in a defined pattern or motif. In certain embodiments, each nucleobase is modified. In certain embodiments, none of the nucleobases are modified. In certain embodiments, each purine or each pyrimidine is modified. In certain embodiments, each adenine is modified. In certain embodiments, each guanine is modified. In certain embodiments, each thymine is modified. In certain embodiments, each uracil is modified. In certain embodiments, each cytosine is modified. In certain embodiments, some or all of the cytosine nucleobases in a modified oligonucleotide are 5-methylcytosines.

[0294] In certain embodiments, modified oligonucleotides comprise a block of modified nucleobases. In certain such embodiments, the block is at the 3′-end of the oligonucleotide. In certain embodiments, the block is within 3 nucleosides of the 3′-end of the oligonucleotide. In certain embodiments, the block is at the 5′-end of the oligonucleotide. In certain embodiments, the block is within 3 nucleosides of the 5′-end of the oligonucleotide.

[0295] In certain embodiments, oligonucleotides having a gapmer motif comprise a nucleoside comprising a modified nucleobase. In certain such embodiments, one nucleoside comprising a modified nucleobase is in the central gap of an oligonucleotide having a gapmer motif. In certain such embodiments, the sugar moiety of said nucleoside is a 2′-deoxyribosyl moiety. In certain embodiments, the modified nucleobase is selected from: a 2-thiopyrimidine and a 5-propynepyrimidine.

[0296] c. Certain Internucleoside Linkage Motifs

[0297] In certain embodiments, compounds described herein comprise oligonucleotides. In certain embodiments, oligonucleotides comprise modified and/or unmodified internucleoside linkages arranged along the oligonucleotide or region thereof in a defined pattern or motif. In certain embodiments, essentially each internucleoside linking group is a phosphate internucleoside linkage (P═O). In certain embodiments, each internucleoside linking group of a modified oligonucleotide is a phosphorothioate (P═S). In certain embodiments, each internucleoside linking group of a modified oligonucleotide is independently selected from a phosphorothioate and phosphate internucleoside linkage. In certain embodiments, the sugar motif of a modified oligonucleotide is a gapmer and the internucleoside linkages within the gap are all modified. In certain such embodiments, some or all of the internucleoside linkages in the wings are unmodified phosphate linkages. In certain embodiments, the terminal internucleoside linkages are modified. In certain embodiments, the sugar motif of a modified oligonucleotide is a gapmer, and the internucleoside linkage motif comprises at least one phosphodiester internucleoside linkage in at least one wing, wherein the at least one phosphodiester linkage is not a terminal internucleoside linkage, and the remaining internucleoside linkages are phosphorothioate internucleoside linkages. In certain such embodiments, all of the phosphorothioate linkages are stereorandom. In certain embodiments, all of the phosphorothioate linkages in the wings are (Sp) phosphorothioates, and the gap comprises at least one Sp, Sp, Rp motif. In certain embodiments, populations of modified oligonucleotides are enriched for modified oligonucleotides comprising such internucleoside linkage motifs.

[0298] 4. Certain Modified Oligonucleotides

[0299] In certain embodiments, compounds described herein comprise modified oligonucleotides. In certain embodiments, the above modifications (sugar, nucleobase, internucleoside linkage) are incorporated into a modified oligonucleotide. In certain embodiments, modified oligonucleotides are characterized by their modification, motifs, and overall lengths. In certain embodiments, such parameters are each independent of one another. Thus, unless otherwise indicated, each internucleoside linkage of an oligonucleotide having a gapmer sugar motif may be modified or unmodified and may or may not follow the gapmer modification pattern of the sugar modifications. For example, the internucleoside linkages within the wing regions of a sugar gapmer may be the same or different from one another and may be the same or different from the internucleoside linkages of the gap region of the sugar motif. Likewise, such gapmer oligonucleotides may comprise one or more modified nucleobases independent of the gapmer pattern of the sugar modifications. Furthermore, in certain instances, an oligonucleotide is described by an overall length or range and by lengths or length ranges of two or more regions (e.g., a regions of nucleosides having specified sugar modifications). In such circumstances, it may be possible to select numbers for each range that result in an oligonucleotide having an overall length falling outside the specified range. In such circumstances, both elements must be satisfied. For example, in certain embodiments, a modified oligonucleotide consists of 15-20 linked nucleosides and has a sugar motif consisting of three regions, A, B, and C, wherein region A consists of 2-6 linked nucleosides having a specified sugar motif, region B consists of 6-10 linked nucleosides having a specified sugar motif, and region C consists of 2-6 linked nucleosides having a specified sugar motif. Such embodiments do not include modified oligonucleotides where A and C each consist of 6 linked nucleosides and B consists of 10 linked nucleosides (even though those numbers of nucleosides are permitted within the requirements for A, B, and C) because the overall length of such oligonucleotide will be 22, which exceeds the upper limit of the overall length of the modified oligonucleotide (20). Herein, if a description of an oligonucleotide is silent with respect to one or more parameters, such parameter is not limited. Thus, a modified oligonucleotide described only as having a gapmer sugar motif without further description may have any length, internucleoside linkage motif, and nucleobase motif. Unless otherwise indicated, all modifications are independent of nucleobase sequence.

### Certain Conjugated Compounds

[0300] In certain embodiments, the compounds described herein comprise or consist of an oligonucleotide (modified or unmodified) and, optionally, one or more conjugate groups and/or terminal groups. Conjugate groups consist of one or more conjugate moiety and a conjugate linker which links the conjugate moiety to the oligonucleotide. Conjugate groups may be attached to either or both ends of an oligonucleotide and/or at any internal position. In certain embodiments, conjugate groups are attached to the 2′-position of a nucleoside of a modified oligonucleotide. In certain embodiments, conjugate groups that are attached to either or both ends of an oligonucleotide are terminal groups. In certain such embodiments, conjugate groups or terminal groups are attached at the 3′ and/or 5′-end of oligonucleotides. In certain such embodiments, conjugate groups (or terminal groups) are attached at the 3′-end of oligonucleotides. In certain embodiments, conjugate groups are attached near the 3′-end of oligonucleotides. In certain embodiments, conjugate groups (or terminal groups) are attached at the 5′-end of oligonucleotides. In certain embodiments, conjugate groups are attached near the 5′-end of oligonucleotides.

[0301] In certain embodiments, the oligonucleotide is modified. In certain embodiments, the oligonucleotide of a compound has a nucleobase sequence that is complementary to a target nucleic acid. In certain embodiments, oligonucleotides are complementary to a messenger RNA (mRNA). In certain embodiments, oligonucleotides are complementary to a pre-mRNA. In certain embodiments, oligonucleotides are complementary to a sense transcript.

[0302] Examples of terminal groups include but are not limited to conjugate groups, capping groups, phosphate moieties, protecting groups, modified or unmodified nucleosides, and two or more nucleosides that are independently modified or unmodified.

[0303] A. Certain Conjugate Groups

[0304] In certain embodiments, oligonucleotides are covalently attached to one or more conjugate groups. In certain embodiments, conjugate groups modify one or more properties of the attached oligonucleotide, including, but not limited to, pharmacodynamics, pharmacokinetics, stability, binding, absorption, tissue distribution, cellular distribution, cellular uptake, charge and clearance. In certain embodiments, conjugate groups impart a new property on the attached oligonucleotide, e.g., fluorophores or reporter groups that enable detection of the oligonucleotide.

[0305] Certain conjugate groups and conjugate moieties have been described previously, for example: cholesterol moiety (Letsinger et al., Proc. Natl. Acad. Sci. USA, 1989, 86, 6553-6556), cholic acid (Manoharan et al., Bioorg. Med. Chem. Lett., 1994, 4, 1053-1060), a thioether, e.g., hexyl-S-tritylthiol (Manoharan et al., Ann. N. Y. Acad. Sci., 1992, 660, 306-309; Manoharan et al., Bioorg. Med. Chem. Lett., 1993, 3, 2765-2770), a thiocholesterol (Oberhauser et al., Nucl. Acids Res., 1992, 20, 533-538), an aliphatic chain, e.g., do-decan-diol or undecyl residues (Saison-Behmoaras et al., EMBO J., 1991, 10, 1111-1118; Kabanov et al., FEBS Lett., 1990, 259, 327-330; Svinarchuk et al., Biochimie, 1993, 75, 49-54), a phospholipid, e.g., di-hexadecyl-rac-glycerol or triethyl-ammonium 1,2-di-O-hexadecyl-rac-glycero-3-H-phosphonate (Manoharan et al., Tetrahedron Lett., 1995, 36, 3651-3654; Shea et al., Nucl. Acids Res., 1990, 18, 3777-3783), a polyamine or a polyethylene glycol chain (Manoharan et al., Nucleosides & Nucleotides, 1995, 14, 969-973), or adamantane acetic, a palmityl moiety (Mishra et al., Biochim. Biophys. Acta, 1995, 1264, 229-237), an octadecylamine or hexylamino-carbonyl-oxycholesterol moiety (Crooke et al., J. Pharmacol. Exp. Ther., 1996, i, 923-937), a tocopherol group (Nishina et al., Molecular Therapy Nucleic Acids, 2015, 4, e220; doi:10.1038/mtna.2014.72 and Nishina et al., Molecular Therapy, 2008, 16, 734-740), or a GalNAc cluster (e.g., WO2014/179620).

[0306] 1. Conjugate Moieties

[0307] Conjugate moieties include, without limitation, intercalators, reporter molecules, polyamines, polyamides, peptides, carbohydrates (e.g., GalNAc), vitamin moieties, polyethylene glycols, thioethers, polyethers, cholesterols, thiocholesterols, cholic acid moieties, folate, lipids, phospholipids, biotin, phenazine, phenanthridine, anthraquinone, adamantane, acridine, fluoresceins, rhodamines, coumarins, fluorophores, and dyes.

[0308] In certain embodiments, a conjugate moiety comprises an active drug substance, for example, aspirin, warfarin, phenylbutazone, ibuprofen, suprofen, fen-bufen, ketoprofen, (S)-(+)-pranoprofen, carprofen, dansylsarcosine, 2,3,5-triiodobenzoic acid, fingolimod, flufenamic acid, folinic acid, a benzothiadiazide, chlorothiazide, a diazepine, indo-methicin, a barbiturate, a cephalosporin, a sulfa drug, an antidiabetic, an antibacterial, or an antibiotic.

[0309] 2. Conjugate linkers

[0310] Conjugate moieties are attached to oligonucleotides through conjugate linkers. In certain embodiments, a conjugate group is a single chemical bond (i.e. conjugate moiety is attached to an oligonucleotide via a conjugate linker through a single bond). In certain embodiments, the conjugate linker comprises a chain structure, such as a hydrocarbyl chain, or an oligomer of repeating units, such as ethylene glycol, nucleosides, or amino acid units.

[0311] In certain embodiments, a conjugate linker comprises one or more groups selected from alkyl, amino, oxo, amide, disulfide, polyethylene glycol, ether, thioether, and hydroxylamino. In certain such embodiments, the conjugate linker comprises groups selected from alkyl, amino, oxo, amide and ether groups. In certain embodiments, the conjugate linker comprises groups selected from alkyl and amide groups. In certain embodiments, the conjugate linker comprises groups selected from alkyl and ether groups. In certain embodiments, the conjugate linker comprises at least one phosphorus moiety. In certain embodiments, the conjugate linker comprises at least one phosphate group. In certain embodiments, the conjugate linker includes at least one neutral linking group.

[0312] In certain embodiments, conjugate linkers, including the conjugate linkers described above, are bifunctional linking moieties, e.g., those known in the art to be useful for attaching conjugate groups to parent compounds, such as the oligonucleotides provided herein. In general, a bifunctional linking moiety comprises at least two functional groups. One of the functional groups is selected to bind to a particular site on a compound and the other is selected to bind to a conjugate group. Examples of functional groups used in a bifunctional linking moiety include, but are not limited to, electrophiles for reacting with nucleophilic groups and nucleophiles for reacting with electrophilic groups. In certain embodiments, bifunctional linking moieties comprise one or more groups selected from amino, hydroxyl, carboxylic acid, thiol, alkyl, alkenyl, and alkynyl.

[0313] Examples of conjugate linkers include, but are not limited to, pyrrolidine, 8-amino-3,6-dioxaoctanoic acid (ADO), succinimidyl 4-(N-maleimidomethyl) cyclohexane-1-carboxylate (SMCC) and 6-aminohexanoic acid (AHEX or AHA). Other conjugate linkers include, but are not limited to, substituted or unsubstituted C₁-C₁₀ alkyl, substituted or unsubstituted C₂-C₁₀ alkenyl, or substituted or unsubstituted C₂-C₁₀ alkynyl, wherein a nonlimiting list of preferred substituent groups includes hydroxyl, amino, alkoxy, carboxy, benzyl, phenyl, nitro, thiol, thioalkoxy, halogen, alkyl, aryl, alkenyl, and alkynyl.

[0314] In certain embodiments, conjugate linkers comprise 1-10 linker-nucleosides. In certain embodiments, such linker-nucleosides are modified nucleosides. In certain embodiments, such linker-nucleosides comprise a modified sugar moiety. In certain embodiments, linker-nucleosides are unmodified. In certain embodiments, linker-nucleosides comprise an optionally protected heterocyclic base selected from a purine, substituted purine, pyrimidine or substituted pyrimidine. In certain embodiments, a cleavable moiety is a nucleoside selected from uracil, thymine, cytosine, 4-N-benzoylcytosine, 5-methylcytosine, 4-N-benzoyl-5-methylcytosine, adenine, 6-N-benzoyladenine, guanine and 2-N-isobutyrylguanine. It is typically desirable for linker-nucleosides to be cleaved from the compound after it reaches a target tissue. Accordingly, linker-nucleosides are typically linked to one another and to the remainder of the compound through cleavable bonds. In certain embodiments, such cleavable bonds are phosphodiester bonds.

[0315] Herein, linker-nucleosides are not considered to be part of the oligonucleotide. Accordingly, in embodiments in which a compound comprises an oligonucleotide consisting of a specified number or range of linked nucleosides and/or a specified percent complementarity to a reference nucleic acid and the compound also comprises a conjugate group comprising a conjugate linker comprising linker-nucleosides, those linker-nucleosides are not counted toward the length of the oligonucleotide and are not used in determining the percent complementarity of the oligonucleotide for the reference nucleic acid. For example, a compound may comprise (1) a modified oligonucleotide consisting of 8-30 nucleosides and (2) a conjugate group comprising 1-10 linker-nucleosides that are contiguous with the nucleosides of the modified oligonucleotide. The total number of contiguous linked nucleosides in such a compound is more than 30. Alternatively, a compound may comprise a modified oligonucleotide consisting of 8-30 nucleosides and no conjugate group. The total number of contiguous linked nucleosides in such a compound is no more than 30. Unless otherwise indicated, conjugate linkers comprise no more than 10 linker-nucleosides. In certain embodiments, conjugate linkers comprise no more than 5 linker-nucleosides. In certain embodiments, conjugate linkers comprise no more than 3 linker-nucleosides. In certain embodiments, conjugate linkers comprise no more than 2 linker-nucleosides. In certain embodiments, conjugate linkers comprise no more than 1 linker-nucleoside.

[0316] In certain embodiments, it is desirable for a conjugate group to be cleaved from the oligonucleotide. For example, in certain circumstances, compounds comprising a particular conjugate moiety are better taken up by a particular cell type, but once the compound has been taken up, it is desirable that the conjugate group be cleaved to release the unconjugated or parent oligonucleotide. Thus, certain conjugates may comprise one or more cleavable moieties, typically within the conjugate linker. In certain embodiments, a cleavable moiety is a cleavable bond. In certain embodiments, a cleavable moiety is a group of atoms comprising at least one cleavable bond. In certain embodiments, a cleavable moiety comprises a group of atoms having one, two, three, four, or more than four cleavable bonds. In certain embodiments, a cleavable moiety is selectively cleaved inside a cell or subcellular compartment, such as a lysosome. In certain embodiments, a cleavable moiety is selectively cleaved by endogenous enzymes, such as nucleases.

[0317] In certain embodiments, a cleavable bond is selected from among: an amide, an ester, an ether, one or both esters of a phosphodiester, a phosphate ester, a carbamate, or a disulfide. In certain embodiments, a cleavable bond is one or both of the esters of a phosphodiester. In certain embodiments, a cleavable moiety comprises a phosphate or phosphodiester. In certain embodiments, the cleavable moiety is a phosphate linkage between an oligonucleotide and a conjugate moiety or conjugate group.

[0318] In certain embodiments, a cleavable moiety comprises or consists of one or more linker-nucleosides. In certain such embodiments, one or more linker-nucleosides are linked to one another and/or to the remainder of the compound through cleavable bonds. In certain embodiments, such cleavable bonds are unmodified phosphodiester bonds. In certain embodiments, a cleavable moiety is 2′-deoxy nucleoside that is attached to either the 3′ or 5′-terminal nucleoside of an oligonucleotide by a phosphate internucleoside linkage and covalently attached to the remainder of the conjugate linker or conjugate moiety by a phosphate or phosphorothioate linkage. In certain such embodiments, the cleavable moiety is 2′-deoxyadenosine.

[0319] 3. Certain Cell-Targeting Conjugate Moieties

[0320] In certain embodiments, a conjugate group comprises a cell-targeting conjugate moiety. In certain embodiments, a conjugate group has the general formula:

[chemical structure]

[0321] wherein n is from 1 to about 3, m is 0 when n is 1, m is 1 when n is 2 or greater, j is 1 or 0, and k is 1 or 0.

[0322] In certain embodiments, n is 1, j is 1 and k is 0. In certain embodiments, n is 1, j is 0 and k is 1. In certain embodiments, n is 1, j is 1 and k is 1. In certain embodiments, n is 2, j is 1 and k is 0. In certain embodiments, n is 2, j is 0 and k is 1. In certain embodiments, n is 2, j is 1 and k is 1. In certain embodiments, n is 3, j is 1 and k is 0. In certain embodiments, n is 3, j is 0 and k is 1. In certain embodiments, n is 3, j is 1 and k is 1.

[0323] In certain embodiments, conjugate groups comprise cell-targeting moieties that have at least one tethered ligand. In certain embodiments, cell-targeting moieties comprise two tethered ligands covalently attached to a branching group. In certain embodiments, cell-targeting moieties comprise three tethered ligands covalently attached to a branching group.

[0324] In certain embodiments, the cell-targeting moiety comprises a branching group comprising one or more groups selected from alkyl, amino, oxo, amide, disulfide, polyethylene glycol, ether, thioether, and hydroxylamino groups. In certain embodiments, the branching group comprises a branched aliphatic group comprising groups selected from alkyl, amino, oxo, amide, disulfide, polyethylene glycol, ether, thioether, and hydroxylamino groups. In certain such embodiments, the branched aliphatic group comprises groups selected from alkyl, amino, oxo, amide, and ether groups. In certain such embodiments, the branched aliphatic group comprises groups selected from alkyl, amino, and ether groups. In certain such embodiments, the branched aliphatic group comprises groups selected from alkyl and ether groups. In certain embodiments, the branching group comprises a mono or polycyclic ring system.

[0325] In certain embodiments, each tether of a cell-targeting moiety comprises one or more groups selected from alkyl, substituted alkyl, ether, thioether, disulfide, amino, oxo, amide, phosphodiester, and polyethylene glycol, in any combination. In certain embodiments, each tether is a linear aliphatic group comprising one or more groups selected from alkyl, ether, thioether, disulfide, amino, oxo, amide, and polyethylene glycol, in any combination. In certain embodiments, each tether is a linear aliphatic group comprising one or more groups selected from alkyl, phosphodiester, ether, amino, oxo, and amide, in any combination. In certain embodiments, each tether is a linear aliphatic group comprising one or more groups selected from alkyl, ether, amino, oxo, and amide, in any combination. In certain embodiments, each tether is a linear aliphatic group comprising one or more groups selected from alkyl, amino, and oxo, in any combination. In certain embodiments, each tether is a linear aliphatic group comprising one or more groups selected from alkyl and oxo, in any combination. In certain embodiments, each tether is a linear aliphatic group comprising one or more groups selected from alkyl and phosphodiester, in any combination. In certain embodiments, each tether comprises at least one phosphorus linking group or neutral linking group. In certain embodiments, each tether comprises a chain from about 6 to about 20 atoms in length. In certain embodiments, each tether comprises a chain from about 10 to about 18 atoms in length. In certain embodiments, each tether comprises about 10 atoms in chain length.

[0326] In certain embodiments, each ligand of a cell-targeting moiety has an affinity for at least one type of receptor on a target cell. In certain embodiments, each ligand has an affinity for at least one type of receptor on the surface of a mammalian liver cell. In certain embodiments, each ligand has an affinity for the hepatic asialoglycoprotein receptor (ASGP-R). In certain embodiments, each ligand is a carbohydrate. In certain embodiments, each ligand is, independently selected from galactose, N-acetyl galactoseamine (GalNAc), mannose, glucose, glucoseamine, and fucose. In certain embodiments, each ligand is N-acetyl galactoseamine (GalNAc). In certain embodiments, the cell-targeting moiety comprises 3 GalNAc ligands. In certain embodiments, the cell-targeting moiety comprises 2 GalNAc ligands. In certain embodiments, the cell-targeting moiety comprises 1 GalNAc ligand.

[0327] In certain embodiments, each ligand of a cell-targeting moiety is a carbohydrate, carbohydrate derivative, modified carbohydrate, polysaccharide, modified polysaccharide, or polysaccharide derivative. In certain such embodiments, the conjugate group comprises a carbohydrate cluster (see, e.g., Maier et al., “Synthesis of Antisense Oligonucleotides Conjugated to a Multivalent Carbohydrate Cluster for Cellular Targeting,” Bioconjugate Chemistry, 2003, 14, 18-29, or Rensen et al., “Design and Synthesis of Novel N-Acetylgalactosamine-Terminated Glycolipids for Targeting of Lipoproteins to the Hepatic Asiaglycoprotein Receptor,” J. Med. Chem. 2004, 47, 5798-5808, which are incorporated herein by reference in their entirety). In certain such embodiments, each ligand is an amino sugar or a thio sugar. For example, amino sugars may be selected from any number of compounds known in the art, such as sialic acid, α-D-galactosamine, β-muramic acid, 2-deoxy-2-methylamino-L-glucopyranose, 4,6-dideoxy-4-formamido-2,3-di-O-methyl-D-mannopyranose, 2-deoxy-2-sulfoamino-D-glucopyranose and N-sulfo-D-glucosamine, and N-glycoloyl-α-neuraminic acid. For example, thio sugars may be selected from 5-Thio-β-D-glucopyranose, methyl 2,3,4-tri-O-acetyl-1-thio-6-O-trityl-α-D-glucopyranoside, 4-thio-β-D-galactopyranose, and ethyl 3,4,6,7-tetra-O-acetyl-2-deoxy-1,5-dithio-α-D-gluco-heptopyranoside.

[0328] In certain embodiments, conjugate groups comprise a cell-targeting moiety having the formula:

[chemical structure]

[0329] In certain embodiments, conjugate groups comprise a cell-targeting moiety having the formula:

[chemical structure]

[0330] In certain embodiments, conjugate groups comprise a cell-targeting moiety having the formula:

[chemical structure]

[0331] In certain embodiments, compounds described herein comprise a conjugate group described herein as “LICA-1”. LICA-1 is shown below without the optional cleavable moiety at the end of the conjugate linker:

[chemical structure]

[0332] In certain embodiments, compounds described herein comprise LICA-1 and a cleavable moiety within the conjugate linker have the formula:

[chemical structure]

[0333] wherein ‘oligo’ is an oligonucleotide.

[0334] Representative publications that teach the preparation of certain of the above noted conjugate groups and compounds comprising conjugate groups, tethers, conjugate linkers, branching groups, ligands, cleavable moieties as well as other modifications include, without limitation, U.S. Pat. Nos. 5,994,517, 6,300,319, 6,660,720, 6,906,182, 7,262,177, 7,491,805, 8,106,022, 7,723,509, 9,127,276, US 2006/0148740, US 2011/0123520, WO 2013/033230 and WO 2012/037254, Biessen et al., J. Med. Chem. 1995, 38, 1846-1852, Lee et al., Bioorganic & Medicinal Chemistry 2011, 19, 2494-2500, Rensen et al., J. Biol. Chem. 2001, 276, 37577-37584, Rensen et al., J. Med. Chem. 2004, 47, 5798-5808, Sliedregt et al., J. Med. Chem. 1999, 42, 609-618, and Valentijn et al., Tetrahedron, 1997, 53, 759-770, each of which is incorporated by reference herein in its entirety.

[0335] In certain embodiments, compounds described herein comprise modified oligonucleotides comprising a gapmer or fully modified motif and a conjugate group comprising at least one, two, or three GalNAc ligands. In certain embodiments, compounds described herein comprise a conjugate group found in any of the following references: Lee, Carbohydr Res, 1978, 67, 509-514; Connolly et al., J Biol Chem, 1982, 257, 939-945; Pavia et al., Int J Pep Protein Res, 1983, 22, 539-548; Lee et al., Biochem, 1984, 23, 4255-4261; Lee et al., Glycoconjugate J, 1987, 4, 317-328; Toyokuni et al., Tetrahedron Lett, 1990, 31, 2673-2676; Biessen et al., J Med Chem, 1995, 38, 1538-1546; Valentijn et al., Tetrahedron, 1997, 53, 759-770; Kim et al., Tetrahedron Lett, 1997, 38, 3487-3490; Lee et al., Bioconjug Chem, 1997, 8, 762-765; Kato et al., Glycobiol, 2001, 11, 821-829; Rensen et al., J Biol Chem, 2001, 276, 37577-37584; Lee et al., Methods Enzymol, 2003, 362, 38-43; Westerlind et al., Glycoconj J, 2004, 21, 227-241; Lee et al., Bioorg Med Chem Lett, 2006, 16(19), 5132-5135; Maierhofer et al., Bioorg Med Chem, 2007, 15, 7661-7676; Khorev et al., Bioorg Med Chem, 2008, 16, 5216-5231; Lee et al., Bioorg Med Chem, 2011, 19, 2494-2500; Korilova et al., Analyt Biochem, 2012, 425, 43-46; Pujol et al., Angew Chemie Int Ed Engl, 2012, 51, 7445-7448; Biessen et al., J Med Chem, 1995, 38, 1846-1852; Sliedregt et al., J Med Chem, 1999, 42, 609-618; Rensen et al., J Med Chem, 2004, 47, 5798-5808; Rensen et al., Arterioscler Thromb Vasc Biol, 2006, 26, 169-175; van Rossenberg et al., Gene Ther, 2004, 11, 457-464; Sato et al., J Am Chem Soc, 2004, 126, 14013-14022; Lee et al., J Org Chem, 2012, 77, 7564-7571; Biessen et al., FASEB J, 2000, 14, 1784-1792; Rajur et al., Bioconjug Chem, 1997, 8, 935-940; Duff et al., Methods Enzymol, 2000, 313, 297-321; Maier et al., Bioconjug Chem, 2003, 14, 18-29; Jayaprakash et al., Org Lett, 2010, 12, 5410-5413; Manoharan, Antisense Nucleic Acid Drug Dev, 2002, 12, 103-128; Merwin et al., Bioconjug Chem, 1994, 5, 612-620; Tomiya et al., Bioorg Med Chem, 2013, 21, 5275-5281; International applications WO1998/013381; WO2011/038356; WO1997/046098; WO2008/098788; WO2004/101619; WO2012/037254; WO2011/120053; WO2011/100131; WO2011/163121; WO2012/177947; WO2013/033230; WO2013/075035; WO2012/083185; WO2012/083046; WO2009/082607; WO2009/134487; WO2010/144740; WO2010/148013; WO1997/020563; WO2010/088537; WO2002/043771; WO2010/129709; WO2012/068187; WO2009/126933; WO2004/024757; WO2010/054406; WO2012/089352; WO2012/089602; WO2013/166121; WO2013/165816; U.S. Pat. Nos. 4,751,219; 8,552,163; 6,908,903; 7,262,177; 5,994,517; 6,300,319; 8,106,022; 7,491,805; 7,491,805; 7,582,744; 8,137,695; 6,383,812; 6,525,031; 6,660,720; 7,723,509; 8,541,548; 8,344,125; 8,313,772; 8,349,308; 8,450,467; 8,501,930; 8,158,601; 7,262,177; 6,906,182; 6,620,916; 8,435,491; 8,404,862; 7,851,615; Published U.S. Patent Application Publications US2011/0097264; US2011/0097265; US2013/0004427; US2005/0164235; US2006/0148740; US2008/0281044; US2010/0240730; US2003/0119724; US2006/0183886; US2008/0206869; US2011/0269814; US2009/0286973; US2011/0207799; US2012/0136042; US2012/0165393; US2008/0281041; US2009/0203135; US2012/0035115; US2012/0095075; US2012/0101148; US2012/0128760; US2012/0157509; US2012/0230938; US2013/0109817; US2013/0121954; US2013/0178512; US2013/0236968; US2011/0123520; US2003/0077829; US2008/0108801; and US2009/0203132; each of which is incorporated by reference in its entirety.

### Compositions and Methods for Formulating Pharmaceutical Compositions

[0336] Compounds described herein may be admixed with pharmaceutically acceptable active or inert substances for the preparation of pharmaceutical compositions or formulations. Compositions and methods for the formulation of pharmaceutical compositions are dependent upon a number of criteria, including, but not limited to, route of administration, extent of disease, or dose to be administered.

[0337] Certain embodiments provide pharmaceutical compositions comprising one or more compounds or a salt thereof. In certain embodiments, the compounds are antisense compounds or oligomeric compounds. In certain embodiments, the compounds comprise or consist of a modified oligonucleotide. In certain such embodiments, the pharmaceutical composition comprises a suitable pharmaceutically acceptable diluent or carrier. In certain embodiments, a pharmaceutical composition comprises a sterile saline solution and one or more compound. In certain embodiments, such pharmaceutical composition consists of a sterile saline solution and one or more compound. In certain embodiments, the sterile saline is pharmaceutical grade saline. In certain embodiments, a pharmaceutical composition comprises one or more compound and sterile water. In certain embodiments, a pharmaceutical composition consists of one compound and sterile water. In certain embodiments, the sterile water is pharmaceutical grade water. In certain embodiments, a pharmaceutical composition comprises one or more compounds and phosphate-buffered saline (PBS). In certain embodiments, a pharmaceutical composition consists of one or more compound and sterile PBS. In certain embodiments, the sterile PBS is pharmaceutical grade PBS. Compositions and methods for the formulation of pharmaceutical compositions are dependent upon a number of criteria, including, but not limited to, route of administration, extent of disease, or dose to be administered.

[0338] A compound described herein targeted to PNPLA3 nucleic acid can be utilized in pharmaceutical compositions by combining the compound with a suitable pharmaceutically acceptable diluent or carrier. In certain embodiments, a pharmaceutically acceptable diluent is water, such as sterile water suitable for injection. Accordingly, in one embodiment, employed in the methods described herein is a pharmaceutical composition comprising a compound targeted to PNPLA3 nucleic acid and a pharmaceutically acceptable diluent. In certain embodiments, the pharmaceutically acceptable diluent is water. In certain embodiments, the compound comprises or consists of a modified oligonucleotide provided herein.

[0339] Pharmaceutical compositions comprising compounds provided herein encompass any pharmaceutically acceptable salts, esters, or salts of such esters, or any other oligonucleotide which, upon administration to an animal, including a human, is capable of providing (directly or indirectly) the biologically active metabolite or residue thereof. In certain embodiments, the compounds are antisense compounds or oligomeric compounds. In certain embodiments, the compound comprises or consists of a modified oligonucleotide. Accordingly, for example, the disclosure is also drawn to pharmaceutically acceptable salts of compounds, prodrugs, pharmaceutically acceptable salts of such prodrugs, and other bioequivalents. Suitable pharmaceutically acceptable salts include, but are not limited to, sodium and potassium salts.

[0340] A prodrug can include the incorporation of additional nucleosides at one or both ends of a compound which are cleaved by endogenous nucleases within the body, to form the active compound.

[0341] In certain embodiments, the compounds or compositions further comprise a pharmaceutically acceptable carrier or diluent.

### Certain Selected Compounds

[0342] Approximately 2,384 newly designed compounds of various lengths, chemistries, and motifs were tested for their effect on human PNPLA3 mRNA in vitro in several cell types (Example 1). Of 2,384 compounds tested for potency at a single dose in vitro, over 400 selected compounds were tested for dose dependent inhibition in A431 cells (Example 2). Of the over 400 compounds tested by dose response assays, the compounds were further screened for high dose tolerability in a BALB/c mouse model and 87 oligonucleotides were selected for in vivo efficacy in a PNPLA3 transgenic mouse model.

[0343] Of the 87 oligonucleotides tested in the transgenic mouse model, 23 oligonucleotides were selected to be further tested for tolerability in preclinical rodel models. In the in vivo rodent tolerability models, body weights and organ weights, liver function markers (such as alanine transaminase, aspartate transaminase and bilirubin), and kidney function markers (such as BUN and creatinine) were measured. In the CD1 mouse model and in the Sprague-Dawley rat model, ION 975591, 975605, 975612, 975613, 975616, 975617, 975735, 975736, 994282, and 994284 were found tolerable (Examples 5 and 6).

[0344] These compounds were further tested for efficacy in multi-dose assays in PNPLA3 transgenic mice (Example 7).

[0345] IONs 994284, 97605, 975616, 994282, 975613, 975617, 975735, 975736, and 975612 were tested for tolerability in cynomolgus monkeys (Example 8). Treatment with the compounds was well tolerated in the monkeys.

[0346] Accordingly, provided herein are compounds with any one or more of the improved properties. In certain embodiments, the compounds as described herein are potent and tolerable.

### EXAMPLES

[0347] The Examples below describe the screening process to identify lead compounds targeted to PNPLA3. ION 994284, 97605, 975616, 994282, 975613, 975617, 975735, 975736, and 975612 resulted in high potency and tolerability.

### Non-Limiting Disclosure and Incorporation by Reference

[0348] Although the sequence listing accompanying this filing identifies each sequence as either “RNA” or “DNA” as required, in reality, those sequences may be modified with any combination of chemical modifications. One of skill in the art will readily appreciate that such designation as “RNA” or “DNA” to describe modified oligonucleotides is, in certain instances, arbitrary. For example, an oligonucleotide comprising a nucleoside comprising a 2′-OH sugar moiety and a thymine base could be described as a DNA having a modified sugar (2′-OH for the natural 2′-H of DNA) or as an RNA having a modified base (thymine (methylated uracil) for natural uracil of RNA).

[0349] Accordingly, nucleic acid sequences provided herein, including, but not limited to, those in the sequence listing, are intended to encompass nucleic acids containing any combination of natural or modified RNA and/or DNA, including, but not limited to, such nucleic acids having modified nucleobases. By way of further example and without limitation, an oligonucleotide having the nucleobase sequence “ATCGATCG” encompasses any oligonucleotides having such nucleobase sequence, whether modified or unmodified, including, but not limited to, such compounds comprising RNA bases, such as those having sequence “AUCGAUCG” and those having some DNA bases and some RNA bases such as “AUCGATCG” and compounds having other modified nucleobases, such as “ATmCGAUCG,” wherein ^{m}C indicates a cytosine base comprising a methyl group at the 5-position.

[0350] Certain compounds described herein (e.g. modified oligonucleotides) have one or more asymmetric centers and thus give rise to enantiomers, diastereomers, and other stereoisomeric configurations that may be defined, in terms of absolute stereochemistry, as (R) or (S), as a or R, such as for sugar anomers, or as (D) or (L), such as for amino acids, etc. Compounds provided herein that are drawn or described as having certain stereoisomeric configurations include only the indicated compounds. Compounds provided herein that are drawn or described with undefined stereochemistry include all such possible isomers, including their stereorandom and optically pure forms. Likewise, all tautomeric forms of the compounds provided herein are included unless otherwise indicated. Unless otherwise indicated, oligomeric compounds and modified oligonucleotides described herein are intended to include corresponding salt forms.

[0351] Compounds described herein include variations in which one or more atoms are replaced with a non-radioactive isotope or radioactive isotope of the indicated element. For example, compounds herein that comprise hydrogen atoms encompass all possible deuterium substitutions for each of the ¹H hydrogen atoms. Isotopic substitutions encompassed by the compounds herein include, but are not limited to: 2H or ³H in place of ¹H, ¹³C or ¹⁴C in place of ¹²C, ¹⁵N in place of ¹⁴N, ¹⁷O or ¹⁸O in place of 160, and 33S, 34S, 35S, or 36S in place of 32.

[0352] While certain compounds, compositions and methods described herein have been described with specificity in accordance with certain embodiments, the following examples serve only to illustrate the compounds described herein and are not intended to limit the same. Each of the references recited in the present application is incorporated herein by reference in its entirety.

### Example 1: Antisense Inhibition of Human PNPLA3 in A431 Cells

[0353] Antisense oligonucleotides were designed targeting a PNPLA3 nucleic acid and were tested for their effects on PNPLA3 mRNA in vitro. The antisense oligonucleotides were tested in a series of experiments that had similar culture conditions. The results for each experiment are presented in separate tables shown below.

[0354] The newly designed chimeric antisense oligonucleotides in the Tables below were designed as 3-10-3 cEt gapmers. The gapmers are 16 nucleosides in length, wherein the central gap segment comprises of ten 2′-deoxynucleosides and is flanked by wing segments on the 5′ direction and the 3′ direction comprising three nucleosides. Each nucleoside in the 5′ wing segment and each nucleoside in the 3′ wing segment has a cEt sugar modification. The internucleoside linkages throughout each gapmer are phosphorothioate (P═S) linkages. All cytosine residues throughout each gapmer are 5-methylcytosines.

[0355] “Start site” indicates the 5′-most nucleoside to which the gapmer is targeted in the human gene sequence. “Stop site” indicates the 3′-most nucleoside to which the gapmer is targeted human gene sequence. Each gapmer listed in the Tables below is targeted to either the human PNPLA3 mRNA, designated herein as SEQ ID NO: 1 (GENBANK Accession No. NM_025225.2) or the human PNPLA3 genomic sequence, designated herein as SEQ ID NO: 2 (GENBANK Accession No. NC_000022.11 truncated from nucleotides 43921001 to 43954500). ‘n/a’ indicates that the antisense oligonucleotide does not target that particular gene sequence with 100% complementarity.

### Study 1

[0356] Cultured A431 cells at a density of 20,000 cells per well were transfected by free uptake with 4,000 nM antisense oligonucleotide. After a treatment period of approximately 24 hours, RNA was isolated from the cells and PNPLA3 mRNA levels were measured by quantitative real-time PCR. Human primer probe set RTS36070 (forward sequence CCTTGGTATGTTCCTGCTTCA, designated herein as SEQ ID NO: 11; reverse sequence GTTGTCACTCACTCCTCCATC, designated herein as SEQ ID NO: 12; probe sequence TGGCCTTATCCCTCCTTCCTTCAGA, designated herein as SEQ ID NO: 13) was used to measure mRNA levels. PNPLA3 mRNA levels were adjusted according to total RNA content, as measured by RIBOGREEN®. Results are presented as percent inhibition of PNPLA3, relative to untreated control cells.

TABLE 1
Inhibition of PNPLA3 mRNA by 3-10-3 cEt gapmers targeting SEQ ID NO: 1 and 2

| | SEQ | SEQ | SEQ | SEQ | | | |
|---|---|---|---|---|---|---|---|
| | ID | ID | ID | ID | | | |
| | NO: 1 | NO: 1 | NO: 2 | NO: 2 | | PNPLA3 | SEQ |
| Compound | Start | Stop | Start | Stop | | % | ID |
| Number | Site | Site | Site | Site | Sequence (5′ to 3′) | Inhibition | NO |
| 912709 | 27 | 42 | 2765 | 2780 | GGCATTCCCAGCGCGA | 0 | 17 |
| 912710 | 95 | 110 | 2833 | 2848 | TCCTGATCCGCAGCAG | 15 | 18 |
| 912711 | 103 | 118 | 2841 | 2856 | GGCTCGGGTCCTGATC | 0 | 19 |
| 912712 | 131 | 146 | 2869 | 2884 | GTTAGGATCTGGGTCG | 91 | 20 |
| 912713 | 164 | 179 | 2902 | 2917 | GTACATGGCGGCGGCG | 0 | 21 |
| 912714 | 183 | 198 | 2921 | 2936 | TCCAGCCGCGCTCTGC | 23 | 22 |
| 912715 | 196 | 211 | 2934 | 2949 | GCGAAGGACAAGCTCC | 60 | 23 |
| 912716 | 197 | 212 | 2935 | 2950 | CGCGAAGGACAAGCTC | 0 | 24 |
| 912717 | 272 | 287 | 3010 | 3025 | GCGGAGGAGGTGCGGG | 0 | 25 |
| 912718 | 273 | 288 | 3011 | 3026 | CGCGGAGGAGGTGCGG | 0 | 26 |
| 912719 | 274 | 289 | 3012 | 3027 | TCGCGGAGGAGGTGCG | 19 | 27 |
| 912720 | 290 | 305 | 3028 | 3043 | GAACAACATGCGCGCG | 0 | 28 |
| 912721 | 291 | 306 | 3029 | 3044 | CGAACAACATGCGCGC | 7 | 29 |
| 912722 | 292 | 307 | 3030 | 3045 | CCGAACAACATGCGCG | 21 | 30 |
| 912723 | 293 | 308 | 3031 | 3046 | GCCGAACAACATGCGC | 0 | 31 |
| 912724 | 294 | 309 | 3032 | 3047 | CGCCGAACAACATGCG | 0 | 32 |
| 912725 | 323 | 338 | 3061 | 3076 | GCCGACGCAGTGCAAC | 0 | 33 |
| 912726 | 324 | 339 | 3062 | 3077 | CGCCGACGCAGTGCAA | 0 | 34 |
| 912727 | 340 | 355 | 3078 | 3093 | GGGATACCGGAGAGGA | 43 | 35 |
| 912728 | 370 | 385 | 5944 | 5959 | TCTGAGAGGACCTGCA | 53 | 36 |
| 912729 | 375 | 390 | 5949 | 5964 | CAAGATCTGAGAGGAC | 64 | 37 |
| 912730 | 404 | 419 | 5978 | 5993 | GCCAATGTTCCGACTC | 71 | 38 |
| 912731 | 410 | 425 | 5984 | 5999 | GAAGATGCCAATGTTC | 51 | 39 |
| 912732 | 429 | 444 | 6003 | 6018 | TTAAGTTGAAGGATGG | 96 | 40 |
| 912733 | 432 | 447 | 6006 | 6021 | TGCTTAAGTTGAAGGA | 90 | 41 |
| 912734 | 478 | 493 | 6052 | 6067 | TGGACATTGGCCGGGA | 85 | 42 |
| 912735 | 479 | 494 | 6053 | 6068 | GTGGACATTGGCCGGG | 50 | 43 |
| 912736 | 484 | 499 | 6058 | 6073 | AGCTGGTGGACATTGG | 64 | 44 |
| 912737 | 528 | 543 | 6102 | 6117 | CATCAGACACTCTGGT | 5 | 45 |
| 912738 | 531 | 546 | 6105 | 6120 | CCCCATCAGACACTCT | 73 | 46 |
| 912739 | 552 | 567 | 6126 | 6141 | AGTCAGACACCAGAAC | 54 | 47 |
| 912755 | 693 | 708 | 11911 | 11926 | TGGCATCAATGAAGGG | 74 | 48 |
| 912756 | 698 | 713 | 11916 | 11931 | TGTTTTGGCATCAATG | 91 | 49 |
| 912757 | 746 | 761 | 11964 | 11979 | TTTAGGGCAGATGTCG | 89 | 50 |
| 912758 | 747 | 762 | 11965 | 11980 | CTTTAGGGCAGATGTC | 90 | 51 |
| 912759 | 795 | 810 | 12013 | 12028 | GTAGACTGAGCTTGGT | 98 | 52 |
| 912760 | 820 | 835 | 12038 | 12053 | AGGTAGAGGTTCCCTG | 0 | 53 |
| 912761 | 841 | 856 | 12059 | 12074 | GGGACAAAAGCTCTCG | 20 | 54 |
| 912762 | 873 | 888 | 13609 | 13624 | GGCATATCTCTCCCAG | 0 | 55 |
| 912763 | 874 | 889 | 13610 | 13625 | AGGCATATCTCTCCCA | 0 | 56 |
| 912764 | 886 | 901 | 13622 | 13637 | AAATATCCTCGAAGGC | 57 | 57 |
| 912765 | 888 | 903 | 13624 | 13639 | CCAAATATCCTCGAAG | 30 | 58 |
| 912766 | 889 | 904 | 13625 | 13640 | TCCAAATATCCTCGAA | 38 | 59 |
| 912767 | 894 | 909 | 13630 | 13645 | ATGCATCCAAATATCC | 58 | 60 |
| 912768 | 925 | 940 | N/A | N/A | TTGCAGATGCCCTTCT | 15 | 61 |
| 912769 | 968 | 983 | 16088 | 16103 | ATCCATCCCTTCTGAG | 34 | 62 |
| 912770 | 986 | 1001 | 16106 | 16121 | GGGCATGGCGACCTCA | 0 | 63 |
| 912771 | 1004 | 1019 | 16124 | 16139 | ACTCATGTTTGCCCAG | 67 | 64 |
| 912772 | 1068 | 1083 | 16188 | 16203 | GGTCTAGCAGCTCATC | 89 | 65 |
| 912773 | 1075 | 1090 | 16195 | 16210 | CGCAGGTGGTCTAGCA | 0 | 66 |
| 912774 | 1076 | 1091 | 16196 | 16211 | ACGCAGGTGGTCTAGC | 25 | 67 |
| 912775 | 1080 | 1095 | 16200 | 16215 | TGAGACGCAGGTGGTC | 50 | 68 |
| 912776 | 1086 | 1101 | 16206 | 16221 | GGATGCTGAGACGCAG | 67 | 69 |
| 912777 | 1172 | 1187 | 19012 | 19027 | GTATCCACCTTTGTCT | 78 | 70 |
| 912778 | 1178 | 1193 | 19018 | 19033 | GCTCATGTATCCACCT | 79 | 71 |
| 912779 | 1187 | 1202 | 19027 | 19042 | GCAAATCTTGCTCATG | 3 | 72 |
| 912780 | 1188 | 1203 | 19028 | 19043 | TGCAAATCTTGCTCAT | 13 | 73 |
| 912781 | 1189 | 1204 | 19029 | 19044 | TTGCAAATCTTGCTCA | 0 | 74 |
| 912782 | 1195 | 1210 | 19035 | 19050 | AGCAAGTTGCAAATCT | 77 | 75 |
| 912783 | 1199 | 1214 | 19039 | 19054 | GGGTAGCAAGTTGCAA | 74 | 76 |
| 912784 | 1205 | 1220 | 19045 | 19060 | CCTAATGGGTAGCAAG | 62 | 77 |
| 912785 | 1206 | 1221 | 19046 | 19061 | TCCTAATGGGTAGCAA | 79 | 78 |

TABLE 2
Inhibition of PNPLA3 mRNA by 3-10-3 cEt gapmers targeting SEQ ID NO: 1 and 2

| | SEQ | SEQ | SEQ | SEQ | | | |
|---|---|---|---|---|---|---|---|
| | ID | ID | ID | ID | | | |
| | NO: 1 | NO: 1 | NO: 2 | NO: 2 | | PNPLA3 | SEQ |
| Compound | Start | Stop | Start | Stop | | % | ID |
| Number | Site | Site | Site | Site | Sequence (5′ to 3′) | Inhibition | NO |
| 912786 | 1207 | 1222 | 19047 | 19062 | ATCCTAATGGGTAGCA | 81 | 79 |
| 912787 | 1211 | 1226 | 19051 | 19066 | CATTATCCTAATGGGT | 46 | 80 |
| 912788 | 1212 | 1227 | 19052 | 19067 | ACATTATCCTAATGGG | 0 | 81 |
| 912789 | 1213 | 1228 | 19053 | 19068 | GACATTATCCTAATGG | 70 | 82 |
| 912790 | 1220 | 1235 | 19060 | 19075 | TACATAAGACATTATC | 34 | 83 |
| 912791 | 1224 | 1239 | 19064 | 19079 | GCATTACATAAGACAT | 86 | 84 |
| 912792 | 1245 | 1260 | 19085 | 19100 | CCACAGGCAGGGTACA | 76 | 85 |
| 912793 | 1246 | 1261 | 19086 | 19101 | TCCACAGGCAGGGTAC | 28 | 86 |
| 912794 | 1253 | 1268 | 19093 | 19108 | GGCAGATTCCACAGGC | 75 | 87 |
| 912795 | 1259 | 1274 | 19099 | 19114 | CGCAATGGCAGATTCC | 92 | 88 |
| 912796 | 1265 | 1280 | 19105 | 19120 | GACAATCGCAATGGCA | 64 | 89 |
| 912797 | 1266 | 1281 | 19106 | 19121 | GGACAATCGCAATGGC | 75 | 90 |
| 912798 | 1267 | 1282 | 19107 | 19122 | TGGACAATCGCAATGG | 73 | 91 |
| 912799 | 1285 | 1300 | 23690 | 23705 | AGCCATGTCACCAGTC | 67 | 92 |
| 912800 | 1289 | 1304 | 23694 | 23709 | TGGAAGCCATGTCACC | 24 | 93 |
| 912801 | 1290 | 1305 | 23695 | 23710 | CTGGAAGCCATGTCAC | 72 | 94 |
| 912802 | 1297 | 1312 | 23702 | 23717 | GGCATATCTGGAAGCC | 0 | 95 |
| 912803 | 1298 | 1313 | 23703 | 23718 | GGGCATATCTGGAAGC | 0 | 96 |
| 912804 | 1351 | 1366 | 23756 | 23771 | AGCACTCGAGTGAACA | 0 | 97 |
| 912805 | 1386 | 1401 | N/A | N/A | GCATTTGGGACCTGGA | 77 | 98 |
| 912806 | 1387 | 1402 | N/A | N/A | GGCATTTGGGACCTGG | 60 | 99 |
| 912807 | 1388 | 1403 | 25151 | 25166 | TGGCATTTGGGACCTG | 41 | 100 |
| 912808 | 1394 | 1409 | 25157 | 25172 | GCTCACTGGCATTTGG | 44 | 101 |
| 912809 | 1523 | 1538 | 25286 | 25301 | GTTCAGGCTGGACCTG | 49 | 102 |
| 912810 | 1547 | 1562 | 25310 | 25325 | AGGTACTTTATTGCCC | 11 | 103 |
| 912811 | 1550 | 1565 | 25313 | 25328 | AGCAGGTACTTTATTG | 64 | 104 |
| 912812 | 1653 | 1668 | 25416 | 25431 | AACTTTAGCACCTCTG | 91 | 105 |
| 912813 | 1655 | 1670 | 25418 | 25433 | GAAACTTTAGCACCTC | 88 | 106 |
| 912814 | 1656 | 1671 | 25419 | 25434 | GGAAACTTTAGCACCT | 53 | 107 |
| 912815 | 1669 | 1684 | 25432 | 25447 | CTGCACAAAGATGGGA | 80 | 108 |
| 912816 | 1671 | 1686 | 25434 | 25449 | AGCTGCACAAAGATGG | 45 | 109 |
| 912817 | 1685 | 1700 | 25448 | 25463 | AGCAATGCGGAGGTAG | 15 | 110 |
| 912818 | 1740 | 1755 | 25503 | 25518 | ACCAACTCAGCTCAGA | 85 | 111 |
| 912819 | 1741 | 1756 | 25504 | 25519 | AACCAACTCAGCTCAG | 79 | 112 |
| 912820 | 1757 | 1772 | 25520 | 25535 | TCCTAGCTTTTCATAA | 23 | 113 |
| 912821 | 1788 | 1803 | 25551 | 25566 | TGCTGGACCGCTGCAC | 0 | 114 |
| 912822 | 1796 | 1811 | 25559 | 25574 | GAGTTAAGTGCTGGAC | 93 | 115 |
| 912823 | 1802 | 1817 | 25565 | 25580 | GTATTAGAGTTAAGTG | 92 | 116 |
| 912824 | 1803 | 1818 | 25566 | 25581 | TGTATTAGAGTTAAGT | 79 | 117 |
| 912825 | 1806 | 1821 | 25569 | 25584 | TGATGTATTAGAGTTA | 92 | 118 |
| 912826 | 1808 | 1823 | 25571 | 25586 | GCTGATGTATTAGAGT | 80 | 119 |
| 912827 | 1821 | 1836 | 25584 | 25599 | TGAATTAACGCATGCT | 83 | 120 |
| 912828 | 1822 | 1837 | 25585 | 25600 | CTGAATTAACGCATGC | 78 | 121 |
| 912829 | 1870 | 1885 | 25633 | 25648 | AGTAAGGGACCCTCTG | 17 | 122 |
| 912830 | 1871 | 1886 | 25634 | 25649 | CAGTAAGGGACCCTCT | 28 | 123 |
| 912831 | 1872 | 1887 | 25635 | 25650 | TCAGTAAGGGACCCTC | 77 | 124 |
| 912832 | 1874 | 1889 | 25637 | 25652 | AGTCAGTAAGGGACCC | 51 | 125 |
| 912833 | 1893 | 1908 | 25656 | 25671 | ATTAATAGGGCCACGA | 80 | 126 |
| 912834 | 1895 | 1910 | 25658 | 25673 | CCATTAATAGGGCCAC | 90 | 127 |
| 912835 | 1896 | 1911 | 25659 | 25674 | ACCATTAATAGGGCCA | 81 | 128 |
| 912836 | 1906 | 1921 | 25669 | 25684 | GAACAGTCTGACCATT | 82 | 129 |
| 912837 | 1908 | 1923 | 25671 | 25686 | TGGAACAGTCTGACCA | 31 | 130 |
| 912838 | 1909 | 1924 | 25672 | 25687 | CTGGAACAGTCTGACC | 83 | 131 |
| 912839 | 1911 | 1926 | 25674 | 25689 | TGCTGGAACAGTCTGA | 72 | 132 |
| 912840 | 1916 | 1931 | 25679 | 25694 | CCTCATGCTGGAACAG | 83 | 133 |
| 912841 | 1928 | 1943 | 25691 | 25706 | TCATTCTAAGAACCTC | 96 | 134 |
| 912842 | 1945 | 1960 | 25708 | 25723 | ACCCATCCAAACACCT | 16 | 135 |
| 912843 | 1982 | 1997 | 25745 | 25760 | ACACATGGGCCAGCCT | 70 | 136 |
| 912844 | 1989 | 2004 | 25752 | 25767 | CAAGATCACACATGGG | 70 | 137 |
| 912845 | 2057 | 2072 | 25820 | 25835 | GGGACGAACTGCACCC | 0 | 138 |
| 912846 | 2098 | 2113 | 25861 | 25876 | TATCATCTTTGCAGAC | 81 | 139 |
| 912847 | 2116 | 2131 | 25879 | 25894 | GTTTTTAGTAGTCAAG | 91 | 140 |
| 912848 | 2117 | 2132 | 25880 | 25895 | CGTTTTTAGTAGTCAA | 91 | 141 |
| 912849 | 2145 | 2160 | 25908 | 25923 | TATCATCTTGTTACCC | 85 | 142 |
| 912850 | 2148 | 2163 | 25911 | 25926 | GATTATCATCTTGTTA | 70 | 143 |
| 912851 | 2150 | 2165 | 25913 | 25928 | TAGATTATCATCTTGT | 53 | 144 |
| 912852 | 2151 | 2166 | 25914 | 25929 | GTAGATTATCATCTTG | 80 | 145 |
| 912853 | 2152 | 2167 | 25915 | 25930 | AGTAGATTATCATCTT | 84 | 146 |
| 912854 | 2175 | 2190 | 25938 | 25953 | GTGAAAAAGGTGTTCT | 77 | 147 |
| 912855 | 2182 | 2197 | 25945 | 25960 | TAGTTAGGTGAAAAAG | 92 | 148 |
| 912856 | 2188 | 2203 | 25951 | 25966 | TTATTTTAGTTAGGTG | 88 | 149 |
| 912857 | 2190 | 2205 | 25953 | 25968 | CATTATTTTAGTTAGG | 86 | 150 |
| 912858 | 2273 | 2288 | 26036 | 26051 | CTACTAACATCTCACT | 55 | 151 |
| 912859 | 2274 | 2289 | 26037 | 26052 | TCTACTAACATCTCAC | 89 | 152 |
| 912860 | 2278 | 2293 | 26041 | 26056 | TTATTCTACTAACATC | 27 | 153 |
| 912861 | 2280 | 2295 | 26043 | 26058 | GCTTATTCTACTAACA | 79 | 154 |
| 912862 | 2281 | 2296 | 26044 | 26059 | GGCTTATTCTACTAAC | 81 | 155 |
| 912863 | 2632 | 2647 | 26395 | 26410 | GGTGAATGCCCTGCAC | 41 | 156 |

TABLE 3
Inhibition of PNPLA3 mRNA by 3-10-3 cEt gapmers targeting SEQ ID NO: 1 and 2

| | SEQ | SEQ | SEQ | SEQ | | | |
|---|---|---|---|---|---|---|---|
| | ID | ID | ID | ID | | | |
| | NO: 1 | NO: 1 | NO: 2 | NO: 2 | | PNPLA3 | SEQ |
| Compound | Start | Stop | Start | Stop | | % | ID |
| Number | Site | Site | Site | Site | Sequence (5′ to 3′) | Inhibition | NO |
| 912864 | 2703 | 2718 | 26466 | 26481 | TTCAAGTTGTGTGCTC | 90 | 157 |
| 912865 | 2755 | 2770 | 26518 | 26533 | GGGAGAAACTCACTGA | 37 | 158 |
| 912866 | N/A | N/A | 4416 | 4431 | TGCTACTTGCCCCAGC | 2 | 159 |
| 912867 | N/A | N/A | 4421 | 4436 | CACAATGCTACTTGCC | 87 | 160 |
| 912868 | N/A | N/A | 4584 | 4599 | CCCAATGGCAGGGCTT | 58 | 161 |
| 912869 | N/A | N/A | 4592 | 4607 | TGCTCCTACCCAATGG | 46 | 162 |
| 912870 | N/A | N/A | 4766 | 4781 | GACTTTTATTGTTGCT | 95 | 163 |
| 912871 | N/A | N/A | 4883 | 4898 | TTCTATACCAGAGTGA | 89 | 164 |
| 912872 | N/A | N/A | 4884 | 4899 | TTTCTATACCAGAGTG | 89 | 165 |
| 912873 | N/A | N/A | 5405 | 5420 | GTAGATGGCCTTAATG | 83 | 166 |
| 912876 | N/A | N/A | 6155 | 6170 | TACATCCACGACTTCG | 94 | 167 |
| 912877 | N/A | N/A | 6156 | 6171 | TTACATCCACGACTTC | 76 | 168 |
| 912880 | N/A | N/A | 6606 | 6621 | GGAACATTCAGGGTTT | 13 | 169 |
| 912881 | N/A | N/A | 6834 | 6849 | ATTACTTGGGTGCAGG | 55 | 170 |
| 912884 | N/A | N/A | 6838 | 6853 | GCAGATTACTTGGGTG | 45 | 171 |
| 912885 | N/A | N/A | 6931 | 6946 | TGCAGGACAGGTTCCT | 30 | 172 |
| 912888 | N/A | N/A | 7549 | 7564 | CACACTGGGTCACCAC | 55 | 173 |
| 912889 | N/A | N/A | 7552 | 7567 | AGTCACACTGGGTCAC | 61 | 174 |
| 912928 | N/A | N/A | 12273 | 12288 | GGTATATGTTCCCAGG | 87 | 175 |
| 912929 | N/A | N/A | 12314 | 12329 | TATAACCACAGCCTGG | 29 | 176 |
| 912932 | N/A | N/A | 12321 | 12336 | CTGACTATATAACCAC | 81 | 177 |
| 912933 | N/A | N/A | 12666 | 12681 | ATCTTAGTGGCTGGGT | 91 | 178 |
| 912936 | N/A | N/A | 12767 | 12782 | CTTACTATGGTAGAGT | 88 | 179 |
| 912937 | N/A | N/A | 12768 | 12783 | TCTTACTATGGTAGAG | 74 | 180 |
| 912940 | N/A | N/A | 12835 | 12850 | TGCATTGCATAGCCTT | 97 | 181 |
| 912941 | N/A | N/A | 12836 | 12851 | TTGCATTGCATAGCCT | 96 | 182 |
| 912944 | N/A | N/A | 12907 | 12922 | TGCTTATAAAGCACAC | 61 | 183 |
| 912945 | N/A | N/A | 12988 | 13003 | GGAATAAGCCTCCACC | 14 | 184 |
| 912948 | N/A | N/A | 14055 | 14070 | GAAATCTGATTGCTTC | 59 | 185 |
| 912949 | N/A | N/A | 14393 | 14408 | TACTTATCTGCTCACT | 66 | 186 |
| 912952 | N/A | N/A | 14673 | 14688 | TCTCTTAGTGTCCCCA | 90 | 187 |
| | | | 14707 | 14722 | | | |
| 912953 | N/A | N/A | 14674 | 14689 | ATCTCTTAGTGTCCCC | 92 | 188 |
| | | | 14708 | 14723 | | | |
| 912956 | N/A | N/A | 15284 | 15299 | TCACATTCATGCTTGC | 82 | 189 |
| 912957 | N/A | N/A | 15291 | 15306 | GATAACCTCACATTCA | 0 | 190 |
| 912960 | N/A | N/A | 15712 | 15727 | GAGCTAGGTGCTTCAC | 6 | 191 |
| 912961 | N/A | N/A | 15753 | 15768 | ATAACAACTGAACCAC | 85 | 192 |
| 912964 | N/A | N/A | 15937 | 15952 | GTTATTAGCCAAATGC | 92 | 193 |
| 912965 | N/A | N/A | 16468 | 16483 | GGAGACTTGGCAAGGT | 87 | 194 |
| 912968 | N/A | N/A | 16960 | 16975 | ATTCATGACAGCCCTT | 46 | 195 |
| 912969 | N/A | N/A | 17128 | 17143 | ATCGATTTTTCAGAGT | 9 | 196 |
| 912972 | N/A | N/A | 17134 | 17149 | ACAAACATCGATTTTT | 52 | 197 |
| 912973 | N/A | N/A | 17769 | 17784 | CTCTTTAATGACCTCG | 90 | 198 |
| 912976 | N/A | N/A | 18865 | 18880 | GTCAGAGGCACTCACA | 25 | 199 |
| 912977 | N/A | N/A | 18959 | 18974 | AGCTATTATCTCCCAC | 0 | 200 |
| 912980 | N/A | N/A | 19315 | 19330 | AGTTTCTGGGCTTGCA | 90 | 201 |
| 912981 | N/A | N/A | 19382 | 19397 | GGCAATCACAAGAGAC | 73 | 202 |
| 912984 | N/A | N/A | 20286 | 20301 | AGAGGAAGCCCAATCA | 79 | 203 |
| | | | 20316 | 20331 | | | |
| 912985 | N/A | N/A | 20287 | 20302 | CAGAGGAAGCCCAATC | 93 | 204 |
| | | | 20317 | 20332 | | | |
| 912988 | N/A | N/A | 20658 | 20673 | TAGAAATTGCAGTGCC | 92 | 205 |
| 912989 | N/A | N/A | 20731 | 20746 | TCCTATCCATATATTG | 55 | 206 |
| 912992 | N/A | N/A | 21408 | 21423 | GCAATTCTAGACATGG | 88 | 207 |
| 912993 | N/A | N/A | 21558 | 21573 | AGGACTTACACCAAGA | 86 | 208 |
| 912996 | N/A | N/A | 21936 | 21951 | TTCCTAATAAGAGCCC | 24 | 209 |
| 912997 | N/A | N/A | 21946 | 21961 | GTCAAACATCTTCCTA | 66 | 210 |
| 913000 | N/A | N/A | 22077 | 22092 | AAAACTGTAGGATAGG | 47 | 211 |
| 913001 | N/A | N/A | 22162 | 22177 | GTTACATCCATAAAAC | 0 | 212 |
| 913004 | N/A | N/A | 22169 | 22184 | AGAGAATGTTACATCC | 62 | 213 |
| 913008 | N/A | N/A | 23083 | 23098 | AAAGATTAATCAGGGC | 61 | 214 |
| 913012 | N/A | N/A | 23788 | 23803 | GTATTTACCTGGAGGC | 0 | 215 |
| 913016 | N/A | N/A | 24426 | 24441 | GGCCTATGATTTTCAG | 0 | 216 |

TABLE 4
Inhibition of PNPLA3 mRNA by 3-10-3 cEt gapmers targeting SEQ ID NO: 1 and 2

| | SEQ | SEQ | SEQ | SEQ | | | |
|---|---|---|---|---|---|---|---|
| | ID | ID | ID | ID | | | |
| | NO: 1 | NO: 1 | NO: 2 | NO: 2 | | PNPLA3 | SEQ |
| Compound | Start | Stop | Start | Stop | | % | ID |
| Number | Site | Site | Site | Site | Sequence (5′ to 3′) | Inhibition | NO |
| 912874 | N/A | N/A | 5869 | 5884 | ATACTTTTGGCAAGGC | 96 | 217 |
| 912875 | N/A | N/A | 5870 | 5885 | AATACTTTTGGCAAGG | 91 | 218 |
| 912878 | N/A | N/A | 6159 | 6174 | TGCTTACATCCACGAC | 12 | 219 |
| 912879 | N/A | N/A | 6296 | 6311 | CATCATGTTGGTCTCG | 54 | 220 |
| 912882 | N/A | N/A | 6835 | 6850 | GATTACTTGGGTGCAG | 39 | 221 |
| 912883 | N/A | N/A | 6837 | 6852 | CAGATTACTTGGGTGC | 69 | 222 |
| 912886 | N/A | N/A | 7083 | 7098 | TTTAATGGTGTTTTGG | 87 | 223 |
| 912887 | N/A | N/A | 7478 | 7493 | TCAAATGCCGGTATTC | 52 | 224 |
| 912890 | N/A | N/A | 7587 | 7602 | GTGAACTTCAACTTCC | 56 | 225 |
| 912930 | N/A | N/A | 12317 | 12332 | CTATATAACCACAGCC | 77 | 226 |
| 912931 | N/A | N/A | 12319 | 12334 | GACTATATAACCACAG | 92 | 227 |
| 912934 | N/A | N/A | 12670 | 12685 | AATCATCTTAGTGGCT | 91 | 228 |
| 912935 | N/A | N/A | 12765 | 12780 | TACTATGGTAGAGTGG | 80 | 229 |
| 912938 | N/A | N/A | 12786 | 12801 | GTACATGGTCTGCAAA | 84 | 230 |
| 912939 | N/A | N/A | 12787 | 12802 | TGTACATGGTCTGCAA | 57 | 231 |
| 912942 | N/A | N/A | 12843 | 12858 | GCATGCATTGCATTGC | 16 | 232 |
| 912943 | N/A | N/A | 12885 | 12900 | ACCAATCCTGTTAGAC | 93 | 233 |
| 912946 | N/A | N/A | 13557 | 13572 | GGAGACACCAAGCACC | 42 | 234 |
| 912947 | N/A | N/A | 13751 | 13766 | GCACTAAGTGTTAGAA | 79 | 235 |
| 912950 | N/A | N/A | 14396 | 14411 | GCTTACTTATCTGCTC | 0 | 236 |
| 912951 | N/A | N/A | 14501 | 14516 | GGAGATCCATCCTGCA | 0 | 237 |
| 912954 | N/A | N/A | 14675 | 14690 | CATCTCTTAGTGTCCC | 92 | 238 |
| | | | 14709 | 14724 | | | |
| 912955 | N/A | N/A | 15122 | 15137 | TCCTAATGTCCTCAAC | 9 | 239 |
| 912958 | N/A | N/A | 15293 | 15308 | AAGATAACCTCACATT | 33 | 240 |
| 912959 | N/A | N/A | 15294 | 15309 | CAAGATAACCTCACAT | 22 | 241 |
| 912962 | N/A | N/A | 15754 | 15769 | TATAACAACTGAACCA | 82 | 242 |
| 912963 | N/A | N/A | 15856 | 15871 | GCTTTAAAGCAGGACA | 8 | 243 |
| 912966 | N/A | N/A | 16774 | 16789 | AAAATTGTGGGTTTAG | 68 | 244 |
| 912967 | N/A | N/A | 16850 | 16865 | ATCATTTGGACCATAG | 81 | 245 |
| 912970 | N/A | N/A | 17130 | 17145 | ACATCGATTTTTCAGA | 83 | 246 |
| 912971 | N/A | N/A | 17133 | 17148 | CAAACATCGATTTTTC | 62 | 247 |
| 912974 | N/A | N/A | 17843 | 17858 | GCTTTACAAGCTGGTC | 0 | 248 |
| 912975 | N/A | N/A | 17879 | 17894 | ATCTATGTTCTCCTAG | 0 | 249 |
| 912978 | N/A | N/A | 19125 | 19140 | ACCTAAAATGCTCACC | 0 | 250 |
| 912979 | N/A | N/A | 19198 | 19213 | CCAGACTACATGCCAC | 79 | 251 |
| 912982 | N/A | N/A | 19446 | 19461 | TCTACTAGGCATCTCT | 63 | 252 |
| 912983 | N/A | N/A | 19447 | 19462 | TTCTACTAGGCATCTC | 42 | 253 |
| 912986 | N/A | N/A | 20288 | 20303 | TCAGAGGAAGCCCAAT | 92 | 254 |
| | | | 20318 | 20333 | | | |
| 912987 | N/A | N/A | 20656 | 20671 | GAAATTGCAGTGCCCT | 92 | 255 |
| 912990 | N/A | N/A | 21393 | 21408 | GCCAACCTATCACTGA | 60 | 256 |
| 912991 | N/A | N/A | 21400 | 21415 | AGACATGGCCAACCTA | 32 | 257 |
| 912994 | N/A | N/A | 21565 | 21580 | TGAAATAAGGACTTAC | 67 | 258 |
| 912995 | N/A | N/A | 21934 | 21949 | CCTAATAAGAGCCCCA | 31 | 259 |
| 912998 | N/A | N/A | 22041 | 22056 | GAAATCTGTCAGAGCA | 33 | 260 |
| 912999 | N/A | N/A | 22072 | 22087 | TGTAGGATAGGACTAG | 0 | 261 |
| 913002 | N/A | N/A | 22166 | 22181 | GAATGTTACATCCATA | 53 | 262 |
| 913003 | N/A | N/A | 22168 | 22183 | GAGAATGTTACATCCA | 80 | 263 |
| 913005 | N/A | N/A | 22605 | 22620 | GTGATAAATCTGCAAG | 70 | 264 |
| 913006 | N/A | N/A | 23081 | 23096 | AGATTAATCAGGGCCA | 8 | 265 |
| 913007 | N/A | N/A | 23082 | 23097 | AAGATTAATCAGGGCC | 30 | 266 |
| 913009 | N/A | N/A | 23325 | 23340 | GGTCACATGTGAGCCC | 0 | 267 |
| 913010 | N/A | N/A | 23496 | 23511 | CACTTCTGGTTCAAGA | 13 | 268 |
| 913011 | N/A | N/A | 23580 | 23595 | CCAATCTGATGACTTC | 80 | 269 |
| 913013 | N/A | N/A | 23790 | 23805 | AAGTATTTACCTGGAG | 0 | 270 |
| 913014 | N/A | N/A | 24028 | 24043 | CACTCAAAGAGACTCA | 65 | 271 |
| 913015 | N/A | N/A | 24425 | 24440 | GCCTATGATTTTCAGG | 0 | 272 |
| 913017 | N/A | N/A | 24633 | 24648 | CACTACTGCCCTCTTC | 50 | 273 |
| 913018 | N/A | N/A | 24983 | 24998 | TGCTGGGCTGATGTCA | 0 | 274 |
| 913019 | N/A | N/A | 25150 | 25165 | GGCATTTGGGACCTGA | 67 | 275 |

TABLE 5
Inhibition of PNPLA3 mRNA by 3-10-3 cEt gapmers targeting SEQ ID NO: 1 and 2

| | SEQ | SEQ | SEQ | SEQ | | | |
|---|---|---|---|---|---|---|---|
| | ID | ID | ID | ID | | | |
| | NO: 1 | NO: 1 | NO: 2 | NO: 2 | | PNPLA3 | SEQ |
| Compound | Start | Stop | Start | Stop | | % | ID |
| Number | Site | Site | Site | Site | Sequence (5′ to 3′) | Inhibition | NO |
| 915343 | 1 | 16 | 2739 | 2754 | GCCCCCCTCGGACCAT | 0 | 276 |
| 915363 | 45 | 60 | 2783 | 2798 | CCTCAGTGTCTCGGCC | 0 | 277 |
| 915383 | 107 | 122 | 2845 | 2860 | AATCGGCTCGGGTCCT | 29 | 278 |
| 915403 | 190 | 205 | 2928 | 2943 | GACAAGCTCCAGCCGC | 64 | 279 |
| 915423 | 249 | 264 | 2987 | 3002 | CGCTCAGGCAGCGGGT | 0 | 280 |
| 915443 | 347 | 362 | N/A | N/A | CTCCAGCGGGATACCG | 6 | 281 |
| 915463 | 386 | 401 | 5960 | 5975 | GGCCTTCCGCACAAGA | 0 | 282 |
| 915483 | 416 | 431 | 5990 | 6005 | TGGATGGAAGATGCCA | 28 | 283 |
| 915503 | 452 | 467 | 6026 | 6041 | GAGACCCTGTCGGAGG | 45 | 284 |
| 915523 | 488 | 503 | 6062 | 6077 | GATGAGCTGGTGGACA | 70 | 285 |
| 915543 | 510 | 525 | 6084 | 6099 | GAGAGATGCCTATTTT | 92 | 286 |
| 915563 | 559 | 574 | 6133 | 6148 | GACCGAAAGTCAGACA | 7 | 287 |
| 915603 | 697 | 712 | 11915 | 11930 | GTTTTGGCATCAATGA | 94 | 288 |
| 915623 | 754 | 769 | 11972 | 11987 | GACTTGACTTTAGGGC | 98 | 289 |
| 915643 | 827 | 842 | 12045 | 12060 | CGAGAGAAGGTAGAGG | 97 | 290 |
| 915663 | 879 | 894 | 13615 | 13630 | CTCGAAGGCATATCTC | 66 | 291 |
| 915683 | 932 | 947 | 16052 | 16067 | GGGCCTGTTGCAGATG | 0 | 292 |
| 915703 | 985 | 1000 | 16105 | 16120 | GGCATGGCGACCTCAG | 6 | 293 |
| 915723 | 1037 | 1052 | 16157 | 16172 | AGCCAAGGCAGCCGAC | 0 | 294 |
| 915743 | 1132 | 1147 | 16252 | 16267 | GCGAGCCTGGGCGAGA | 0 | 295 |
| 915763 | 1177 | 1192 | 19017 | 19032 | CTCATGTATCCACCTT | 88 | 296 |
| 915783 | 1229 | 1244 | 19069 | 19084 | GGGCAGCATTACATAA | 73 | 297 |
| 915803 | 1286 | 1301 | 23691 | 23706 | AAGCCATGTCACCAGT | 34 | 298 |
| 915823 | 1348 | 1363 | 23753 | 23768 | ACTCGAGTGAACACCT | 12 | 299 |
| 915843 | 1405 | 1420 | 25168 | 25183 | GCCTGTTGGCTGCTCA | 1 | 300 |
| 915863 | 1473 | 1488 | 25236 | 25251 | CTGCTGGACAGCCCTT | 0 | 301 |
| 915883 | 1542 | 1557 | 25305 | 25320 | CTTTATTGCCCAAGAA | 72 | 302 |
| 915903 | 1601 | 1616 | 25364 | 25379 | CAGACTCTTCTCTAGT | 49 | 303 |
| 915923 | 1633 | 1648 | 25396 | 25411 | AATCTGCTAGACTCGC | 88 | 304 |
| 915943 | 1686 | 1701 | 25449 | 25464 | CAGCAATGCGGAGGTA | 80 | 305 |
| 915963 | 1768 | 1783 | 25531 | 25546 | GAAAGGTTGCTTCCTA | 84 | 306 |
| 915983 | 1789 | 1804 | 25552 | 25567 | GTGCTGGACCGCTGCA | 11 | 307 |
| 916003 | 1815 | 1830 | 25578 | 25593 | AACGCATGCTGATGTA | 69 | 308 |
| 916023 | 1848 | 1863 | 25611 | 25626 | GCTTCCTGGTGTCATT | 81 | 309 |
| 916043 | 1884 | 1899 | 25647 | 25662 | GCCACGAAACAGTCAG | 67 | 310 |
| 916063 | 1913 | 1928 | 25676 | 25691 | CATGCTGGAACAGTCT | 20 | 311 |
| 916083 | 1954 | 1969 | 25717 | 25732 | AAGGCCCCCACCCATC | 0 | 312 |
| 916103 | 1977 | 1992 | 25740 | 25755 | TGGGCCAGCCTACCCC | 0 | 313 |
| 916123 | 2026 | 2041 | 25789 | 25804 | GGAAGTGGGATCATGC | 55 | 314 |
| 916142 | 2100 | 2115 | 25863 | 25878 | GTTATCATCTTTGCAG | 57 | 315 |
| 916162 | 2139 | 2154 | 25902 | 25917 | CTTGTTACCCCCGCCA | 84 | 316 |
| 916182 | 2264 | 2279 | 26027 | 26042 | TCTCACTGATTCACAT | 83 | 317 |
| 916202 | 2624 | 2639 | 26387 | 26402 | CCCTGCACACTAGATT | 55 | 318 |
| 916222 | 2677 | 2692 | 26440 | 26455 | GAGGCGGAAGCTCCTG | 0 | 319 |
| 916242 | 2707 | 2722 | 26470 | 26485 | CAGGTTCAAGTTGTGT | 83 | 320 |
| 916282 | N/A | N/A | 4225 | 4240 | AAATGTACGGAATCTC | 79 | 321 |
| 916302 | N/A | N/A | 4822 | 4837 | GTGTAAACATTTGTCC | 74 | 322 |
| 916322 | N/A | N/A | 5414 | 5429 | AGCTTTGGTGTAGATG | 49 | 323 |
| 916342 | N/A | N/A | 5801 | 5816 | TACTATGGGAGCCACA | 42 | 324 |
| 916362 | N/A | N/A | 6866 | 6881 | TGAAATTGTAACTGCC | 70 | 325 |
| 916382 | N/A | N/A | 7492 | 7507 | TAGATCGGTGCTGTTC | 27 | 326 |
| 916402 | N/A | N/A | 7785 | 7800 | GTTATAGGCGAGAGCA | 0 | 327 |
| 916562 | N/A | N/A | 12316 | 12331 | TATATAACCACAGCCT | 58 | 328 |
| 916582 | N/A | N/A | 12932 | 12947 | ATAAGAGCTGTCTCCT | 94 | 329 |
| 916602 | N/A | N/A | 13703 | 13718 | CTAGTAAATGCTTGTC | 96 | 330 |
| 916622 | N/A | N/A | 14177 | 14192 | CTAATATTTCTACAGC | 0 | 331 |
| 916642 | N/A | N/A | 14672 | 14687 | CTCTTAGTGTCCCCAT | 95 | 332 |
| 916662 | N/A | N/A | 15542 | 15557 | TTCCATCACAAGGCCT | 50 | 333 |
| 916682 | N/A | N/A | 16317 | 16332 | TCCATAATGCACAAGA | 71 | 334 |
| 916702 | N/A | N/A | 17223 | 17238 | TGTAGCTGGTTTGTGG | 88 | 335 |
| 916722 | N/A | N/A | 18223 | 18238 | AACAGCTACATCAGGC | 44 | 336 |
| 916742 | N/A | N/A | 19249 | 19264 | GGCATTGCACATAGAC | 74 | 337 |
| 916761 | N/A | N/A | 20410 | 20425 | GTAAGCAATGCAGCCA | 88 | 338 |
| 916781 | N/A | N/A | 20659 | 20674 | TTAGAAATTGCAGTGC | 91 | 339 |
| 916801 | N/A | N/A | 20989 | 21004 | AGGTATTAAACTGCCA | 25 | 340 |
| 916821 | N/A | N/A | 21506 | 21521 | GTCCTAAGAGCACTCA | 57 | 341 |
| 916841 | N/A | N/A | 22603 | 22618 | GATAAATCTGCAAGAG | 49 | 342 |
| 916861 | N/A | N/A | 23472 | 23487 | GGGACTTACACTGAAA | 66 | 343 |
| 916881 | N/A | N/A | 24314 | 24329 | GTCAACGCAGACTGCT | 33 | 344 |

TABLE 6
Inhibition of PNPLA3 mRNA by 3-10-3 cEt gapmers targeting SEQ ID NO: 1 and 2

| | SEQ | SEQ | SEQ | SEQ | | | |
|---|---|---|---|---|---|---|---|
| | ID | ID | ID | ID | | | |
| | NO: 1 | NO: 1 | NO: 2 | NO: 2 | | PNPLA3 | SEQ |
| Compound | Start | Stop | Start | Stop | | % | ID |
| Number | Site | Site | Site | Site | Sequence (5′ to 3′) | Inhibition | NO |
| 915344 | 2 | 17 | 2740 | 2755 | CGCCCCCCTCGGACCA | 0 | 345 |
| 915364 | 46 | 61 | 2784 | 2799 | GCCTCAGTGTCTCGGC | 0 | 346 |
| 915384 | 108 | 123 | 2846 | 2861 | GAATCGGCTCGGGTCC | 49 | 347 |
| 915404 | 191 | 206 | 2929 | 2944 | GGACAAGCTCCAGCCG | 9 | 348 |
| 915424 | 250 | 265 | 2988 | 3003 | TCGCTCAGGCAGCGGG | 0 | 349 |
| 915444 | 348 | 363 | N/A | N/A | GCTCCAGCGGGATACC | 0 | 350 |
| 915464 | 387 | 402 | 5961 | 5976 | TGGCCTTCCGCACAAG | 0 | 351 |
| 915484 | 428 | 443 | 6002 | 6017 | TAAGTTGAAGGATGGA | 96 | 352 |
| 915504 | 453 | 468 | 6027 | 6042 | AGAGACCCTGTCGGAG | 80 | 353 |
| 915524 | 489 | 504 | 6063 | 6078 | AGATGAGCTGGTGGAC | 81 | 354 |
| 915544 | 512 | 527 | 6086 | 6101 | AAGAGAGATGCCTATT | 77 | 355 |
| 915564 | 560 | 575 | 6134 | 6149 | GGACCGAAAGTCAGAC | 0 | 356 |
| 915604 | 700 | 715 | 11918 | 11933 | GTTGTTTTGGCATCAA | 91 | 357 |
| 915624 | 755 | 770 | 11973 | 11988 | GGACTTGACTTTAGGG | 81 | 358 |
| 915644 | 828 | 843 | 12046 | 12061 | TCGAGAGAAGGTAGAG | 24 | 359 |
| 915664 | 880 | 895 | 13616 | 13631 | CCTCGAAGGCATATCT | 41 | 360 |
| 915684 | 952 | 967 | 16072 | 16087 | GATGACTTCAGGCCTG | 0 | 361 |
| 915704 | 987 | 1002 | 16107 | 16122 | TGGGCATGGCGACCTC | 0 | 362 |
| 915724 | 1038 | 1053 | 16158 | 16173 | CAGCCAAGGCAGCCGA | 0 | 363 |
| 915744 | 1133 | 1148 | 16253 | 16268 | AGCGAGCCTGGGCGAG | 0 | 364 |
| 915764 | 1179 | 1194 | 19019 | 19034 | TGCTCATGTATCCACC | 56 | 365 |
| 915784 | 1230 | 1245 | 19070 | 19085 | AGGGCAGCATTACATA | 69 | 366 |
| 915804 | 1293 | 1308 | 23698 | 23713 | TATCTGGAAGCCATGT | 6 | 367 |
| 915824 | 1349 | 1364 | 23754 | 23769 | CACTCGAGTGAACACC | 0 | 368 |
| 915844 | 1406 | 1421 | 25169 | 25184 | GGCCTGTTGGCTGCTC | 0 | 369 |
| 915864 | 1477 | 1492 | 25240 | 25255 | GTCTCTGCTGGACAGC | 0 | 370 |
| 915884 | 1545 | 1560 | 25308 | 25323 | GTACTTTATTGCCCAA | 73 | 371 |
| 915904 | 1607 | 1622 | 25370 | 25385 | GACTCACAGACTCTTC | 92 | 372 |
| 915924 | 1634 | 1649 | 25397 | 25412 | GAATCTGCTAGACTCG | 65 | 373 |
| 915944 | 1687 | 1702 | 25450 | 25465 | ACAGCAATGCGGAGGT | 83 | 374 |
| 915964 | 1769 | 1784 | 25532 | 25547 | CGAAAGGTTGCTTCCT | 79 | 375 |
| 915984 | 1790 | 1805 | 25553 | 25568 | AGTGCTGGACCGCTGC | 38 | 376 |
| 916004 | 1816 | 1831 | 25579 | 25594 | TAACGCATGCTGATGT | 79 | 377 |
| 916024 | 1849 | 1864 | 25612 | 25627 | GGCTTCCTGGTGTCAT | 73 | 378 |
| 916044 | 1885 | 1900 | 25648 | 25663 | GGCCACGAAACAGTCA | 40 | 379 |
| 916064 | 1914 | 1929 | 25677 | 25692 | TCATGCTGGAACAGTC | 80 | 380 |
| 916084 | 1958 | 1973 | 25721 | 25736 | TCACAAGGCCCCCACC | 35 | 381 |
| 916104 | 1978 | 1993 | 25741 | 25756 | ATGGGCCAGCCTACCC | 0 | 382 |
| 916124 | 2053 | 2068 | 25816 | 25831 | CGAACTGCACCCCTTC | 38 | 383 |
| 916143 | 2101 | 2116 | 25864 | 25879 | GGTTATCATCTTTGCA | 81 | 384 |
| 916163 | 2140 | 2155 | 25903 | 25918 | TCTTGTTACCCCCGCC | 84 | 385 |
| 916183 | 2265 | 2280 | 26028 | 26043 | ATCTCACTGATTCACA | 86 | 386 |
| 916203 | 2625 | 2640 | 26388 | 26403 | GCCCTGCACACTAGAT | 65 | 387 |
| 916223 | 2678 | 2693 | 26441 | 26456 | GGAGGCGGAAGCTCCT | 0 | 388 |
| 916243 | 2709 | 2724 | 26472 | 26487 | GCCAGGTTCAAGTTGT | 62 | 389 |
| 916283 | N/A | N/A | 4226 | 4241 | CAAATGTACGGAATCT | 52 | 390 |
| 916303 | N/A | N/A | 4864 | 4879 | TACTTTAGGCTCCTGG | 90 | 391 |
| 916323 | N/A | N/A | 5422 | 5437 | AGCATTAGAGCTTTGG | 75 | 392 |
| 916343 | N/A | N/A | 5803 | 5818 | TCTACTATGGGAGCCA | 89 | 393 |
| 916363 | N/A | N/A | 6927 | 6942 | GGACAGGTTCCTTGGA | 0 | 394 |
| 916383 | N/A | N/A | 7493 | 7508 | CTAGATCGGTGCTGTT | 14 | 395 |
| 916403 | N/A | N/A | 7786 | 7801 | AGTTATAGGCGAGAGC | 0 | 396 |
| 916563 | N/A | N/A | 12318 | 12333 | ACTATATAACCACAGC | 90 | 397 |
| 916583 | N/A | N/A | 12936 | 12951 | GACAATAAGAGCTGTC | 0 | 398 |
| 916603 | N/A | N/A | 13704 | 13719 | GCTAGTAAATGCTTGT | 73 | 399 |
| 916623 | N/A | N/A | 14231 | 14246 | CCAACTTTTAGTATTA | 92 | 400 |
| 916643 | N/A | N/A | 14678 | 14693 | AGCCATCTCTTAGTGT | 50 | 401 |
| 916663 | N/A | N/A | 15566 | 15581 | TCTGATGTCGAAGAGG | 68 | 402 |
| 916683 | N/A | N/A | 16341 | 16356 | TCCCATGTGGCAGTAC | 0 | 403 |
| 916703 | N/A | N/A | 17239 | 17254 | TCCAAATGCCCAACTC | 37 | 404 |
| 916723 | N/A | N/A | 18241 | 18256 | GCAAATAATGTGCACA | 22 | 405 |
| 916743 | N/A | N/A | 19250 | 19265 | GGGCATTGCACATAGA | 59 | 406 |
| 916762 | N/A | N/A | 20413 | 20428 | GTAGTAAGCAATGCAG | 69 | 407 |
| 916782 | N/A | N/A | 20660 | 20675 | CTTAGAAATTGCAGTG | 91 | 408 |
| 916802 | N/A | N/A | 21002 | 21017 | ATTTTAACAGCTCAGG | 95 | 409 |
| 916822 | N/A | N/A | 21540 | 21555 | TATGACATTTCAGAGT | 88 | 410 |
| 916842 | N/A | N/A | 22629 | 22644 | AGTACAAGCGCAGCCT | 14 | 411 |
| 916862 | N/A | N/A | 23538 | 23553 | ACAAGGACAAGCCCAC | 37 | 412 |
| 916882 | N/A | N/A | 24339 | 24354 | GAAGTAGCGGCATCCC | 68 | 413 |

TABLE 7
Inhibition of PNPLA3 mRNA by 3-10-3 cEt gapmers targeting SEQ ID NO: 1 and 2

| | SEQ | SEQ | SEQ | SEQ | | | |
|---|---|---|---|---|---|---|---|
| | ID | ID | ID | ID | | | |
| | NO: 1 | NO: 1 | NO: 2 | NO: 2 | | PNPLA3 | SEQ |
| Compound | Start | Stop | Start | Stop | | % | ID |
| Number | Site | Site | Site | Site | Sequence (5′ to 3′) | Inhibition | NO |
| 915345 | 3 | 18 | 2741 | 2756 | CCGCCCCCCTCGGACC | 0 | 414 |
| 915365 | 47 | 62 | 2785 | 2800 | TGCCTCAGTGTCTCGG | 0 | 415 |
| 915385 | 109 | 124 | 2847 | 2862 | GGAATCGGCTCGGGTC | 72 | 416 |
| 915405 | 193 | 208 | 2931 | 2946 | AAGGACAAGCTCCAGC | 41 | 417 |
| 915425 | 251 | 266 | 2989 | 3004 | CTCGCTCAGGCAGCGG | 0 | 418 |
| 915445 | 349 | 364 | N/A | N/A | TGCTCCAGCGGGATAC | 0 | 419 |
| 915465 | 388 | 403 | 5962 | 5977 | CTGGCCTTCCGCACAA | 16 | 420 |
| 915485 | 430 | 445 | 6004 | 6019 | CTTAAGTTGAAGGATG | 27 | 421 |
| 915505 | 454 | 469 | 6028 | 6043 | CAGAGACCCTGTCGGA | 72 | 422 |
| 915525 | 492 | 507 | 6066 | 6081 | CGGAGATGAGCTGGTG | 92 | 423 |
| 915545 | 513 | 528 | 6087 | 6102 | TAAGAGAGATGCCTAT | 57 | 424 |
| 915565 | 561 | 576 | 6135 | 6150 | TGGACCGAAAGTCAGA | 0 | 425 |
| 915605 | 701 | 716 | 11919 | 11934 | GGTTGTTTTGGCATCA | 97 | 426 |
| 915625 | 756 | 771 | 11974 | 11989 | TGGACTTGACTTTAGG | 93 | 427 |
| 915645 | 829 | 844 | 12047 | 12062 | CTCGAGAGAAGGTAGA | 0 | 428 |
| 915665 | 881 | 896 | 13617 | 13632 | TCCTCGAAGGCATATC | 0 | 429 |
| 915685 | 953 | 968 | 16073 | 16088 | GGATGACTTCAGGCCT | 0 | 430 |
| 915705 | 988 | 1003 | 16108 | 16123 | CTGGGCATGGCGACCT | 0 | 431 |
| 915725 | 1039 | 1054 | 16159 | 16174 | ACAGCCAAGGCAGCCG | 0 | 432 |
| 915745 | 1134 | 1149 | 16254 | 16269 | TAGCGAGCCTGGGCGA | 0 | 433 |
| 915765 | 1193 | 1208 | 19033 | 19048 | CAAGTTGCAAATCTTG | 0 | 434 |
| 915785 | 1231 | 1246 | 19071 | 19086 | CAGGGCAGCATTACAT | 74 | 435 |
| 915805 | 1300 | 1315 | 23705 | 23720 | TCGGGCATATCTGGAA | 21 | 436 |
| 915825 | 1350 | 1365 | 23755 | 23770 | GCACTCGAGTGAACAC | 0 | 437 |
| 915845 | 1407 | 1422 | 25170 | 25185 | AGGCCTGTTGGCTGCT | 0 | 438 |
| 915865 | 1480 | 1495 | 25243 | 25258 | TTGGTCTCTGCTGGAC | 21 | 439 |
| 915885 | 1546 | 1561 | 25309 | 25324 | GGTACTTTATTGCCCA | 62 | 440 |
| 915905 | 1609 | 1624 | 25372 | 25387 | GTGACTCACAGACTCT | 81 | 441 |
| 915925 | 1635 | 1650 | 25398 | 25413 | AGAATCTGCTAGACTC | 74 | 442 |
| 915945 | 1688 | 1703 | 25451 | 25466 | CACAGCAATGCGGAGG | 56 | 443 |
| 915965 | 1770 | 1785 | 25533 | 25548 | GCGAAAGGTTGCTTCC | 66 | 444 |
| 915985 | 1791 | 1806 | 25554 | 25569 | AAGTGCTGGACCGCTG | 71 | 445 |
| 916005 | 1817 | 1832 | 25580 | 25595 | TTAACGCATGCTGATG | 69 | 446 |
| 916025 | 1850 | 1865 | 25613 | 25628 | GGGCTTCCTGGTGTCA | 58 | 447 |
| 916045 | 1886 | 1901 | 25649 | 25664 | GGGCCACGAAACAGTC | 9 | 448 |
| 916065 | 1915 | 1930 | 25678 | 25693 | CTCATGCTGGAACAGT | 86 | 449 |
| 916085 | 1959 | 1974 | 25722 | 25737 | ATCACAAGGCCCCCAC | 82 | 450 |
| 916105 | 1979 | 1994 | 25742 | 25757 | CATGGGCCAGCCTACC | 0 | 451 |
| 916125 | 2054 | 2069 | 25817 | 25832 | ACGAACTGCACCCCTT | 84 | 452 |
| 916144 | 2102 | 2117 | 25865 | 25880 | AGGTTATCATCTTTGC | 90 | 453 |
| 916164 | 2141 | 2156 | 25904 | 25919 | ATCTTGTTACCCCCGC | 88 | 454 |
| 916184 | 2266 | 2281 | 26029 | 26044 | CATCTCACTGATTCAC | 91 | 455 |
| 916204 | 2626 | 2641 | 26389 | 26404 | TGCCCTGCACACTAGA | 47 | 456 |
| 916224 | 2680 | 2695 | 26443 | 26458 | GAGGAGGCGGAAGCTC | 0 | 457 |
| 916244 | 2710 | 2725 | 26473 | 26488 | AGCCAGGTTCAAGTTG | 71 | 458 |
| 916284 | N/A | N/A | 4227 | 4242 | TCAAATGTACGGAATC | 40 | 459 |
| 916304 | N/A | N/A | 4865 | 4880 | GTACTTTAGGCTCCTG | 89 | 460 |
| 916324 | N/A | N/A | 5429 | 5444 | ACATATCAGCATTAGA | 87 | 461 |
| 916344 | N/A | N/A | 5804 | 5819 | GTCTACTATGGGAGCC | 90 | 462 |
| 916364 | N/A | N/A | 6966 | 6981 | GAAGATGCATAGAGGA | 0 | 463 |
| 916384 | N/A | N/A | 7550 | 7565 | TCACACTGGGTCACCA | 43 | 464 |
| 916544 | N/A | N/A | 12135 | 12150 | GGCAATCAGGGAGGCA | 32 | 465 |
| 916564 | N/A | N/A | 12320 | 12335 | TGACTATATAACCACA | 92 | 466 |
| 916584 | N/A | N/A | 12951 | 12966 | CCCAATTGCCACTAGG | 83 | 467 |
| 916604 | N/A | N/A | 13718 | 13733 | TCTTTACCAAGACCGC | 92 | 468 |
| 916624 | N/A | N/A | 14245 | 14260 | GACAAATTCATCAACC | 87 | 469 |
| 916644 | N/A | N/A | 14778 | 14793 | CTGTATCCAAAAGGCC | 0 | 470 |
| 916664 | N/A | N/A | 15597 | 15612 | ATACATAGCAGAGCCA | 44 | 471 |
| 916684 | N/A | N/A | 16352 | 16367 | CACCCTATCGCTCCCA | 43 | 472 |
| 916704 | N/A | N/A | 17267 | 17282 | AGTTATGTCTGACTCA | 72 | 473 |
| 916724 | N/A | N/A | 18254 | 18269 | AATATACCCCACAGCA | 40 | 474 |
| 916744 | N/A | N/A | 19288 | 19303 | GTGCATGTGTGGCTTG | 82 | 475 |
| 916763 | N/A | N/A | 20414 | 20429 | TGTAGTAAGCAATGCA | 85 | 476 |
| 916783 | N/A | N/A | 20724 | 20739 | CATATATTGCGGATGA | 24 | 477 |
| 916803 | N/A | N/A | 21005 | 21020 | GTTATTTTAACAGCTC | 95 | 478 |
| 916823 | N/A | N/A | 21561 | 21576 | ATAAGGACTTACACCA | 83 | 479 |
| 916843 | N/A | N/A | 22679 | 22694 | CAGCATGCAACCACCC | 8 | 480 |
| 916863 | N/A | N/A | 23550 | 23565 | TGGGATGCTAGGACAA | 72 | 481 |
| 916883 | N/A | N/A | 24340 | 24355 | GGAAGTAGCGGCATCC | 0 | 482 |

TABLE 8
Inhibition of PNPLA3 mRNA by 3-10-3 cEt gapmers targeting SEQ ID NO: 1 and 2

| | SEQ | SEQ | SEQ | SEQ | | | |
|---|---|---|---|---|---|---|---|
| | ID | ID | ID | ID | | | |
| | NO: 1 | NO: 1 | NO: 2 | NO: 2 | | PNPLA3 | SEQ |
| Compound | Start | Stop | Start | Stop | | % | ID |
| Number | Site | Site | Site | Site | Sequence (5′ to 3′) | Inhibition | NO |
| 915346 | 25 | 40 | 2763 | 2778 | CATTCCCAGCGCGACG | 0 | 483 |
| 915366 | 52 | 67 | 2790 | 2805 | TACCCTGCCTCAGTGT | 0 | 484 |
| 915386 | 112 | 127 | 2850 | 2865 | TCGGGAATCGGCTCGG | 26 | 485 |
| 915406 | 195 | 210 | 2933 | 2948 | CGAAGGACAAGCTCCA | 69 | 486 |
| 915426 | 252 | 267 | 2990 | 3005 | GCTCGCTCAGGCAGCG | 0 | 487 |
| 915446 | 350 | 365 | N/A | N/A | CTGCTCCAGCGGGATA | 0 | 488 |
| 915466 | 389 | 404 | 5963 | 5978 | CCTGGCCTTCCGCACA | 40 | 489 |
| 915486 | 431 | 446 | 6005 | 6020 | GCTTAAGTTGAAGGAT | 88 | 490 |
| 915506 | 455 | 470 | 6029 | 6044 | GCAGAGACCCTGTCGG | 32 | 491 |
| 915526 | 493 | 508 | 6067 | 6082 | CCGGAGATGAGCTGGT | 4 | 492 |
| 915546 | 514 | 529 | 6088 | 6103 | GTAAGAGAGATGCCTA | 94 | 493 |
| 915566 | 562 | 577 | 6136 | 6151 | TTGGACCGAAAGTCAG | 56 | 494 |
| 915606 | 702 | 717 | 11920 | 11935 | TGGTTGTTTTGGCATC | 99 | 495 |
| 915626 | 757 | 772 | 11975 | 11990 | GTGGACTTGACTTTAG | 89 | 496 |
| 915646 | 830 | 845 | 12048 | 12063 | TCTCGAGAGAAGGTAG | 0 | 497 |
| 915666 | 882 | 897 | 13618 | 13633 | ATCCTCGAAGGCATAT | 0 | 498 |
| 915686 | 956 | 971 | 16076 | 16091 | TGAGGATGACTTCAGG | 10 | 499 |
| 915706 | 989 | 1004 | 16109 | 16124 | GCTGGGCATGGCGACC | 10 | 500 |
| 915726 | 1064 | 1079 | 16184 | 16199 | TAGCAGCTCATCTCCC | 67 | 501 |
| 915746 | 1135 | 1150 | 16255 | 16270 | GTAGCGAGCCTGGGCG | 0 | 502 |
| 915766 | 1196 | 1211 | 19036 | 19051 | TAGCAAGTTGCAAATC | 78 | 503 |
| 915786 | 1232 | 1247 | 19072 | 19087 | ACAGGGCAGCATTACA | 87 | 504 |
| 915806 | 1302 | 1317 | 23707 | 23722 | CGTCGGGCATATCTGG | 53 | 505 |
| 915826 | 1352 | 1367 | 23757 | 23772 | CAGCACTCGAGTGAAC | 24 | 506 |
| 915846 | 1408 | 1423 | 25171 | 25186 | GAGGCCTGTTGGCTGC | 0 | 507 |
| 915866 | 1508 | 1523 | 25271 | 25286 | GAGGATGGACCGCGGG | 0 | 508 |
| 915886 | 1549 | 1564 | 25312 | 25327 | GCAGGTACTTTATTGC | 0 | 509 |
| 915906 | 1610 | 1625 | 25373 | 25388 | AGTGACTCACAGACTC | 35 | 510 |
| 915926 | 1636 | 1651 | 25399 | 25414 | AAGAATCTGCTAGACT | 69 | 511 |
| 915946 | 1689 | 1704 | 25452 | 25467 | ACACAGCAATGCGGAG | 69 | 512 |
| 915966 | 1771 | 1786 | 25534 | 25549 | GGCGAAAGGTTGCTTC | 58 | 513 |
| 915986 | 1792 | 1807 | 25555 | 25570 | TAAGTGCTGGACCGCT | 70 | 514 |
| 916006 | 1818 | 1833 | 25581 | 25596 | ATTAACGCATGCTGAT | 73 | 515 |
| 916026 | 1851 | 1866 | 25614 | 25629 | TGGGCTTCCTGGTGTC | 71 | 516 |
| 916046 | 1887 | 1902 | 25650 | 25665 | AGGGCCACGAAACAGT | 61 | 517 |
| 916066 | 1917 | 1932 | 25680 | 25695 | ACCTCATGCTGGAACA | 81 | 518 |
| 916086 | 1960 | 1975 | 25723 | 25738 | CATCACAAGGCCCCCA | 48 | 519 |
| 916106 | 1980 | 1995 | 25743 | 25758 | ACATGGGCCAGCCTAC | 54 | 520 |
| 916126 | 2055 | 2070 | 25818 | 25833 | GACGAACTGCACCCCT | 77 | 521 |
| 916145 | 2105 | 2120 | 25868 | 25883 | TCAAGGTTATCATCTT | 89 | 522 |
| 916165 | 2142 | 2157 | 25905 | 25920 | CATCTTGTTACCCCCG | 89 | 523 |
| 916185 | 2270 | 2285 | 26033 | 26048 | CTAACATCTCACTGAT | 66 | 524 |
| 916205 | 2627 | 2642 | 26390 | 26405 | ATGCCCTGCACACTAG | 62 | 525 |
| 916225 | 2681 | 2696 | 26444 | 26459 | AGAGGAGGCGGAAGCT | 25 | 526 |
| 916245 | 2711 | 2726 | 26474 | 26489 | AAGCCAGGTTCAAGTT | 83 | 527 |
| 916285 | N/A | N/A | 4240 | 4255 | ATTAGGACAAGATTCA | 75 | 528 |
| 916305 | N/A | N/A | 4866 | 4881 | TGTACTTTAGGCTCCT | 93 | 529 |
| 916325 | N/A | N/A | 5430 | 5445 | AACATATCAGCATTAG | 85 | 530 |
| 916345 | N/A | N/A | 5839 | 5854 | CAAGGATGCCACCAAC | 84 | 531 |
| 916365 | N/A | N/A | 6974 | 6989 | TCATTATGGAAGATGC | 0 | 532 |
| 916385 | N/A | N/A | 7602 | 7617 | TTAACAACCCTGTCAG | 1 | 533 |
| 916545 | N/A | N/A | 12151 | 12166 | GTAACTGGTAGCTCCT | 93 | 534 |
| 916565 | N/A | N/A | 12338 | 12353 | ACCCATACTGCACCCC | 79 | 535 |
| 916585 | N/A | N/A | 12957 | 12972 | GCCTATCCCAATTGCC | 70 | 536 |
| 916605 | N/A | N/A | 13719 | 13734 | GTCTTTACCAAGACCG | 23 | 537 |
| 916625 | N/A | N/A | 14248 | 14263 | AACGACAAATTCATCA | 84 | 538 |
| 916645 | N/A | N/A | 14788 | 14803 | TGCAATCCCCCTGTAT | 17 | 539 |
| 916665 | N/A | N/A | 15598 | 15613 | AATACATAGCAGAGCC | 68 | 540 |
| 916685 | N/A | N/A | 16366 | 16381 | TGTCATGGTTGCCTCA | 70 | 541 |
| 916705 | N/A | N/A | 17273 | 17288 | ATAAGGAGTTATGTCT | 80 | 542 |
| 916725 | N/A | N/A | 18255 | 18270 | GAATATACCCCACAGC | 58 | 543 |
| 916745 | N/A | N/A | 19295 | 19310 | GTTACAGGTGCATGTG | 75 | 544 |
| 916764 | N/A | N/A | 20435 | 20450 | AGTCATCTGGAGTCAC | 69 | 545 |
| 916784 | N/A | N/A | 20756 | 20771 | TCAGACAACCCACTGA | 24 | 546 |
| 916804 | N/A | N/A | 21046 | 21061 | AGGAATCTGAATCCTA | 0 | 547 |
| 916824 | N/A | N/A | 21640 | 21655 | GATAATTTCCTAGAGC | 29 | 548 |
| 916844 | N/A | N/A | 22699 | 22714 | GAAATAAGTGCTCAGG | 73 | 549 |
| 916864 | N/A | N/A | 23582 | 23597 | CTCCAATCTGATGACT | 53 | 550 |
| 916884 | N/A | N/A | 24347 | 24362 | GAATTCAGGAAGTAGC | 50 | 551 |

TABLE 9
Inhibition of PNPLA3 mRNA by 3-10-3 cEt gapmers targeting SEQ ID NO: 1 and 2

| | SEQ | SEQ | SEQ | SEQ | | | |
|---|---|---|---|---|---|---|---|
| | ID | ID | ID | ID | | | |
| | NO: 1 | NO: 1 | NO: 2 | NO: 2 | | PNPLA3 | SEQ |
| Compound | Start | Stop | Start | Stop | | % | ID |
| Number | Site | Site | Site | Site | Sequence (5′ to 3′) | Inhibition | NO |
| 915347 | 26 | 41 | 2764 | 2779 | GCATTCCCAGCGCGAC | 0 | 552 |
| 915367 | 58 | 73 | 2796 | 2811 | GCTCTCTACCCTGCCT | 9 | 553 |
| 915387 | 113 | 128 | 2851 | 2866 | ATCGGGAATCGGCTCG | 28 | 554 |
| 915407 | 198 | 213 | 2936 | 2951 | CCGCGAAGGACAAGCT | 0 | 555 |
| 915427 | 253 | 268 | 2991 | 3006 | TGCTCGCTCAGGCAGC | 0 | 556 |
| 915447 | 351 | 366 | N/A | N/A | TCTGCTCCAGCGGGAT | 1 | 557 |
| 915467 | 391 | 406 | 5965 | 5980 | CTCCTGGCCTTCCGCA | 29 | 558 |
| 915487 | 433 | 448 | 6007 | 6022 | TTGCTTAAGTTGAAGG | 94 | 559 |
| 915507 | 456 | 471 | 6030 | 6045 | TGCAGAGACCCTGTCG | 31 | 560 |
| 915527 | 494 | 509 | 6068 | 6083 | GCCGGAGATGAGCTGG | 0 | 561 |
| 915547 | 515 | 530 | 6089 | 6104 | GGTAAGAGAGATGCCT | 0 | 562 |
| 915567 | 563 | 578 | 6137 | 6152 | TTTGGACCGAAAGTCA | 0 | 563 |
| 915607 | 703 | 718 | 11921 | 11936 | ATGGTTGTTTTGGCAT | 35 | 564 |
| 915627 | 758 | 773 | 11976 | 11991 | CGTGGACTTGACTTTA | 85 | 565 |
| 915647 | 831 | 846 | 12049 | 12064 | CTCTCGAGAGAAGGTA | 7 | 566 |
| 915667 | 883 | 898 | 13619 | 13634 | TATCCTCGAAGGCATA | 0 | 567 |
| 915687 | 959 | 974 | 16079 | 16094 | TTCTGAGGATGACTTC | 39 | 568 |
| 915707 | 996 | 1011 | 16116 | 16131 | TTGCCCAGCTGGGCAT | 0 | 569 |
| 915727 | 1065 | 1080 | 16185 | 16200 | CTAGCAGCTCATCTCC | 58 | 570 |
| 915747 | 1136 | 1151 | 16256 | 16271 | TGTAGCGAGCCTGGGC | 16 | 571 |
| 915767 | 1197 | 1212 | 19037 | 19052 | GTAGCAAGTTGCAAAT | 80 | 572 |
| 915787 | 1233 | 1248 | 19073 | 19088 | TACAGGGCAGCATTAC | 71 | 573 |
| 915807 | 1316 | 1331 | 23721 | 23736 | CAACCACAGGACATCG | 0 | 574 |
| 915827 | 1353 | 1368 | 23758 | 23773 | TCAGCACTCGAGTGAA | 0 | 575 |
| 915847 | 1409 | 1424 | 25172 | 25187 | GGAGGCCTGTTGGCTG | 0 | 576 |
| 915867 | 1509 | 1524 | 25272 | 25287 | TGAGGATGGACCGCGG | 14 | 577 |
| 915887 | 1553 | 1568 | 25316 | 25331 | ACCAGCAGGTACTTTA | 29 | 578 |
| 915907 | 1611 | 1626 | 25374 | 25389 | AAGTGACTCACAGACT | 29 | 579 |
| 915927 | 1637 | 1652 | 25400 | 25415 | AAAGAATCTGCTAGAC | 60 | 580 |
| 915947 | 1690 | 1705 | 25453 | 25468 | TACACAGCAATGCGGA | 69 | 581 |
| 915967 | 1772 | 1787 | 25535 | 25550 | AGGCGAAAGGTTGCTT | 0 | 582 |
| 915987 | 1793 | 1808 | 25556 | 25571 | TTAAGTGCTGGACCGC | 82 | 583 |
| 916007 | 1819 | 1834 | 25582 | 25597 | AATTAACGCATGCTGA | 61 | 584 |
| 916027 | 1864 | 1879 | 25627 | 25642 | GGACCCTCTGCACTGG | 43 | 585 |
| 916047 | 1888 | 1903 | 25651 | 25666 | TAGGGCCACGAAACAG | 80 | 586 |
| 916067 | 1918 | 1933 | 25681 | 25696 | AACCTCATGCTGGAAC | 72 | 587 |
| 916087 | 1961 | 1976 | 25724 | 25739 | CCATCACAAGGCCCCC | 63 | 588 |
| 916107 | 1981 | 1996 | 25744 | 25759 | CACATGGGCCAGCCTA | 74 | 589 |
| 916127 | 2056 | 2071 | 25819 | 25834 | GGACGAACTGCACCCC | 5 | 590 |
| 916146 | 2106 | 2121 | 25869 | 25884 | GTCAAGGTTATCATCT | 88 | 591 |
| 916166 | 2143 | 2158 | 25906 | 25921 | TCATCTTGTTACCCCC | 90 | 592 |
| 916186 | 2272 | 2287 | 26035 | 26050 | TACTAACATCTCACTG | 1 | 593 |
| 916206 | 2628 | 2643 | 26391 | 26406 | AATGCCCTGCACACTA | 56 | 594 |
| 916226 | 2682 | 2697 | 26445 | 26460 | GAGAGGAGGCGGAAGC | 10 | 595 |
| 916246 | 2712 | 2727 | 26475 | 26490 | TAAGCCAGGTTCAAGT | 81 | 596 |
| 916286 | N/A | N/A | 4244 | 4259 | TTTCATTAGGACAAGA | 61 | 597 |
| 916306 | N/A | N/A | 4867 | 4882 | GTGTACTTTAGGCTCC | 97 | 598 |
| 916326 | N/A | N/A | 5431 | 5446 | GAACATATCAGCATTA | 52 | 599 |
| 916346 | N/A | N/A | 5872 | 5887 | GTAATACTTTTGGCAA | 75 | 600 |
| 916366 | N/A | N/A | 7069 | 7084 | GGTATTACAAATTATC | 10 | 601 |
| 916386 | N/A | N/A | 7603 | 7618 | CTTAACAACCCTGTCA | 0 | 602 |
| 916546 | N/A | N/A | 12152 | 12167 | AGTAACTGGTAGCTCC | 88 | 603 |
| 916566 | N/A | N/A | 12343 | 12358 | CTAATACCCATACTGC | 84 | 604 |
| 916586 | N/A | N/A | 12966 | 12981 | AACTTTGCAGCCTATC | 85 | 605 |
| 916606 | N/A | N/A | 13739 | 13754 | AGAACTAAGGCAAATC | 85 | 606 |
| 916626 | N/A | N/A | 14257 | 14272 | GTCTTGGCCAACGACA | 0 | 607 |
| 916646 | N/A | N/A | 14793 | 14808 | CAGGATGCAATCCCCC | 45 | 608 |
| 916666 | N/A | N/A | 15601 | 15616 | GCCAATACATAGCAGA | 75 | 609 |
| 916686 | N/A | N/A | 16630 | 16645 | GTCCATGAAATCCAGG | 0 | 610 |
| 916706 | N/A | N/A | 17293 | 17308 | TCTCTTAGGGCACCTC | 87 | 611 |
| 916726 | N/A | N/A | 18256 | 18271 | TGAATATACCCCACAG | 24 | 612 |
| 916746 | N/A | N/A | 19337 | 19352 | AGCTCTAGGAGTCCCC | 63 | 613 |
| 916765 | N/A | N/A | 20513 | 20528 | CCAGATTGAGTCTCCT | 91 | 614 |
| 916785 | N/A | N/A | 20775 | 20790 | AATCAAGTGCCCTCCA | 73 | 615 |
| 916805 | N/A | N/A | 21211 | 21226 | TGTAGCTGTGTGGTGG | 85 | 616 |
| 916825 | N/A | N/A | 21760 | 21775 | TACCATGATCAGGTCA | 0 | 617 |
| 916845 | N/A | N/A | 22713 | 22728 | GTAAAGATGTGAGTGA | 85 | 618 |
| 916865 | N/A | N/A | 23606 | 23621 | GTTTACAAAAGCTGCC | 17 | 619 |
| 916885 | N/A | N/A | 24375 | 24390 | TGAACTCCGGCTCAGT | 0 | 620 |

TABLE 10
Inhibition of PNPLA3 mRNA by 3-10-3 cEt gapmers targeting SEQ ID NO: 1 and 2

| | SEQ | SEQ | SEQ | SEQ | | | |
|---|---|---|---|---|---|---|---|
| | ID | ID | ID | ID | | | |
| | NO: 1 | NO: 1 | NO: 2 | NO: 2 | | PNPLA3 | SEQ |
| Compound | Start | Stop | Start | Stop | | % | ID |
| Number | Site | Site | Site | Site | Sequence (5′ to 3′) | Inhibition | NO |
| 915348 | 28 | 43 | 2766 | 2781 | GGGCATTCCCAGCGCG | 0 | 621 |
| 915368 | 59 | 74 | 2797 | 2812 | CGCTCTCTACCCTGCC | 0 | 622 |
| 915388 | 114 | 129 | 2852 | 2867 | GATCGGGAATCGGCTC | 32 | 623 |
| 915408 | 199 | 214 | 2937 | 2952 | CCCGCGAAGGACAAGC | 6 | 624 |
| 915428 | 275 | 290 | 3013 | 3028 | GTCGCGGAGGAGGTGC | 0 | 625 |
| 915448 | 352 | 367 | N/A | N/A | GTCTGCTCCAGCGGGA | 4 | 626 |
| 915468 | 392 | 407 | 5966 | 5981 | ACTCCTGGCCTTCCGC | 87 | 627 |
| 915488 | 434 | 449 | 6008 | 6023 | CTTGCTTAAGTTGAAG | 0 | 628 |
| 915508 | 457 | 472 | 6031 | 6046 | TTGCAGAGACCCTGTC | 63 | 629 |
| 915528 | 495 | 510 | 6069 | 6084 | TGCCGGAGATGAGCTG | 0 | 630 |
| 915548 | 516 | 531 | 6090 | 6105 | TGGTAAGAGAGATGCC | 18 | 631 |
| 915568 | 564 | 579 | 6138 | 6153 | CTTTGGACCGAAAGTC | 10 | 632 |
| 915608 | 704 | 719 | 11922 | 11937 | GATGGTTGTTTTGGCA | 98 | 633 |
| 915628 | 772 | 787 | 11990 | 12005 | ACATGAAGAAAGTTCG | 41 | 634 |
| 915648 | 832 | 847 | 12050 | 12065 | GCTCTCGAGAGAAGGT | 55 | 635 |
| 915668 | 884 | 899 | 13620 | 13635 | ATATCCTCGAAGGCAT | 33 | 636 |
| 915688 | 962 | 977 | 16082 | 16097 | CCCTTCTGAGGATGAC | 11 | 637 |
| 915708 | 998 | 1013 | 16118 | 16133 | GTTTGCCCAGCTGGGC | 0 | 638 |
| 915728 | 1067 | 1082 | 16187 | 16202 | GTCTAGCAGCTCATCT | 68 | 639 |
| 915748 | 1137 | 1152 | 16257 | 16272 | CTGTAGCGAGCCTGGG | 0 | 640 |
| 915768 | 1198 | 1213 | 19038 | 19053 | GGTAGCAAGTTGCAAA | 90 | 641 |
| 915788 | 1234 | 1249 | 19074 | 19089 | GTACAGGGCAGCATTA | 69 | 642 |
| 915808 | 1317 | 1332 | 23722 | 23737 | GCAACCACAGGACATC | 51 | 643 |
| 915828 | 1354 | 1369 | 23759 | 23774 | ATCAGCACTCGAGTGA | 0 | 644 |
| 915848 | 1410 | 1425 | 25173 | 25188 | GGGAGGCCTGTTGGCT | 17 | 645 |
| 915868 | 1510 | 1525 | 25273 | 25288 | CTGAGGATGGACCGCG | 53 | 646 |
| 915888 | 1554 | 1569 | 25317 | 25332 | CACCAGCAGGTACTTT | 0 | 647 |
| 915908 | 1612 | 1627 | 25375 | 25390 | CAAGTGACTCACAGAC | 91 | 648 |
| 915928 | 1639 | 1654 | 25402 | 25417 | TGAAAGAATCTGCTAG | 59 | 649 |
| 915948 | 1691 | 1706 | 25454 | 25469 | CTACACAGCAATGCGG | 20 | 650 |
| 915968 | 1773 | 1788 | 25536 | 25551 | CAGGCGAAAGGTTGCT | 60 | 651 |
| 915988 | 1794 | 1809 | 25557 | 25572 | GTTAAGTGCTGGACCG | 86 | 652 |
| 916008 | 1820 | 1835 | 25583 | 25598 | GAATTAACGCATGCTG | 88 | 653 |
| 916028 | 1865 | 1880 | 25628 | 25643 | GGGACCCTCTGCACTG | 0 | 654 |
| 916048 | 1889 | 1904 | 25652 | 25667 | ATAGGGCCACGAAACA | 75 | 655 |
| 916068 | 1919 | 1934 | 25682 | 25697 | GAACCTCATGCTGGAA | 72 | 656 |
| 916088 | 1962 | 1977 | 25725 | 25740 | CCCATCACAAGGCCCC | 37 | 657 |
| 916108 | 1984 | 1999 | 25747 | 25762 | TCACACATGGGCCAGC | 84 | 658 |
| 916128 | 2079 | 2094 | 25842 | 25857 | CTGACAGGCAGTGTCG | 10 | 659 |
| 916147 | 2107 | 2122 | 25870 | 25885 | AGTCAAGGTTATCATC | 81 | 660 |
| 916167 | 2144 | 2159 | 25907 | 25922 | ATCATCTTGTTACCCC | 88 | 661 |
| 916187 | 2276 | 2291 | 26039 | 26054 | ATTCTACTAACATCTC | 90 | 662 |
| 916207 | 2629 | 2644 | 26392 | 26407 | GAATGCCCTGCACACT | 72 | 663 |
| 916227 | 2691 | 2706 | 26454 | 26469 | GCTCCAGTGGAGAGGA | 14 | 664 |
| 916247 | 2713 | 2728 | 26476 | 26491 | ATAAGCCAGGTTCAAG | 88 | 665 |
| 916287 | N/A | N/A | 4308 | 4323 | GTGAGAAACAAACCCT | 92 | 666 |
| 916307 | N/A | N/A | 4882 | 4897 | TCTATACCAGAGTGAG | 84 | 667 |
| 916327 | N/A | N/A | 5514 | 5529 | AGGAATGAGTCTCCCA | 17 | 668 |
| 916347 | N/A | N/A | 5873 | 5888 | GGTAATACTTTTGGCA | 70 | 669 |
| 916367 | N/A | N/A | 7106 | 7121 | CGCTTATGAAAGCATC | 0 | 670 |
| 916387 | N/A | N/A | 7605 | 7620 | CCCTTAACAACCCTGT | 28 | 671 |
| 916547 | N/A | N/A | 12167 | 12182 | TTTGATTGTGCAGACA | 98 | 672 |
| 916567 | N/A | N/A | 12345 | 12360 | TCCTAATACCCATACT | 74 | 673 |
| 916587 | N/A | N/A | 12969 | 12984 | ACAAACTTTGCAGCCT | 95 | 674 |
| 916607 | N/A | N/A | 13742 | 13757 | GTTAGAACTAAGGCAA | 94 | 675 |
| 916627 | N/A | N/A | 14301 | 14316 | GAGCAGATAAATACAC | 91 | 676 |
| 916647 | N/A | N/A | 14892 | 14907 | TGGTATCTCGCTTCCT | 0 | 677 |
| 916667 | N/A | N/A | 15613 | 15628 | TAAAGCCACGCAGCCA | 46 | 678 |
| 916687 | N/A | N/A | 16656 | 16671 | CCAGATGCAGGACCCC | 0 | 679 |
| 916707 | N/A | N/A | 17326 | 17341 | AAACTAATGCACCTGG | 43 | 680 |
| 916727 | N/A | N/A | 18257 | 18272 | CTGAATATACCCCACA | 75 | 681 |
| 916747 | N/A | N/A | 19360 | 19375 | AGCTGCTATGTGAGGC | 12 | 682 |
| 916766 | N/A | N/A | 20520 | 20535 | TCAGTAACCAGATTGA | 25 | 683 |
| 916786 | N/A | N/A | 20778 | 20793 | TTTAATCAAGTGCCCT | 81 | 684 |
| 916806 | N/A | N/A | 21216 | 21231 | CAGGATGTAGCTGTGT | 84 | 685 |
| 916826 | N/A | N/A | 21887 | 21902 | TAAGATCCCATCTTAC | 13 | 686 |
| 916846 | N/A | N/A | 22739 | 22754 | AAAGTAAACACCCACC | 42 | 687 |
| 916866 | N/A | N/A | 23625 | 23640 | GCTTACAACACTACCC | 57 | 688 |
| 916886 | N/A | N/A | 24393 | 24408 | GTAATGGGAGCCAGGC | 38 | 689 |

TABLE 11
Inhibition of PNPLA3 mRNA by 3-10-3 cEt gapmers targeting SEQ ID NO: 1 and 2

| | SEQ | SEQ | SEQ | SEQ | | | |
|---|---|---|---|---|---|---|---|
| | ID | ID | ID | ID | | | |
| | NO: 1 | NO: 1 | NO: 2 | NO: 2 | | PNPLA3 | SEQ |
| Compound | Start | Stop | Start | Stop | | % | ID |
| Number | Site | Site | Site | Site | Sequence (5′ to 3′) | Inhibition | NO |
| 915349 | 29 | 44 | 2767 | 2782 | AGGGCATTCCCAGCGC | 0 | 690 |
| 915369 | 60 | 75 | 2798 | 2813 | GCGCTCTCTACCCTGC | 23 | 691 |
| 915389 | 115 | 130 | 2853 | 2868 | GGATCGGGAATCGGCT | 54 | 692 |
| 915409 | 200 | 215 | 2938 | 2953 | GCCCGCGAAGGACAAG | 32 | 693 |
| 915429 | 276 | 291 | 3014 | 3029 | CGTCGCGGAGGAGGTG | 0 | 694 |
| 915449 | 364 | 379 | 5938 | 5953 | AGGACCTGCAGAGTCT | 21 | 695 |
| 915469 | 394 | 409 | 5968 | 5983 | CGACTCCTGGCCTTCC | 59 | 696 |
| 915489 | 435 | 450 | 6009 | 6024 | ACTTGCTTAAGTTGAA | 86 | 697 |
| 915509 | 466 | 481 | 6040 | 6055 | GGGAGGCATTTGCAGA | 57 | 698 |
| 915529 | 496 | 511 | 6070 | 6085 | TTGCCGGAGATGAGCT | 40 | 699 |
| 915549 | 518 | 533 | 6092 | 6107 | TCTGGTAAGAGAGATG | 61 | 700 |
| 915569 | 565 | 580 | 6139 | 6154 | TCTTTGGACCGAAAGT | 9 | 701 |
| 915609 | 705 | 720 | 11923 | 11938 | TGATGGTTGTTTTGGC | 99 | 702 |
| 915629 | 776 | 791 | 11994 | 12009 | GTCCACATGAAGAAAG | 32 | 703 |
| 915649 | 833 | 848 | 12051 | 12066 | AGCTCTCGAGAGAAGG | 36 | 704 |
| 915669 | 885 | 900 | 13621 | 13636 | AATATCCTCGAAGGCA | 55 | 705 |
| 915689 | 969 | 984 | 16089 | 16104 | GATCCATCCCTTCTGA | 20 | 706 |
| 915709 | 999 | 1014 | 16119 | 16134 | TGTTTGCCCAGCTGGG | 5 | 707 |
| 915729 | 1077 | 1092 | 16197 | 16212 | GACGCAGGTGGTCTAG | 0 | 708 |
| 915749 | 1138 | 1153 | N/A | N/A | GCTGTAGCGAGCCTGG | 71 | 709 |
| 915769 | 1200 | 1215 | 19040 | 19055 | TGGGTAGCAAGTTGCA | 81 | 710 |
| 915789 | 1235 | 1250 | 19075 | 19090 | GGTACAGGGCAGCATT | 88 | 711 |
| 915809 | 1318 | 1333 | 23723 | 23738 | TGCAACCACAGGACAT | 40 | 712 |
| 915829 | 1355 | 1370 | 23760 | 23775 | CATCAGCACTCGAGTG | 0 | 713 |
| 915849 | 1424 | 1439 | 25187 | 25202 | CTCAGGTGTGCATGGG | 61 | 714 |
| 915869 | 1511 | 1526 | 25274 | 25289 | CCTGAGGATGGACCGC | 70 | 715 |
| 915889 | 1556 | 1571 | 25319 | 25334 | AGCACCAGCAGGTACT | 35 | 716 |
| 915909 | 1613 | 1628 | 25376 | 25391 | TCAAGTGACTCACAGA | 84 | 717 |
| 915929 | 1645 | 1660 | 25408 | 25423 | CACCTCTGAAAGAATC | 89 | 718 |
| 915949 | 1692 | 1707 | 25455 | 25470 | ACTACACAGCAATGCG | 33 | 719 |
| 915969 | 1774 | 1789 | 25537 | 25552 | ACAGGCGAAAGGTTGC | 88 | 720 |
| 915989 | 1795 | 1810 | 25558 | 25573 | AGTTAAGTGCTGGACC | 84 | 721 |
| 916009 | 1823 | 1838 | 25586 | 25601 | GCTGAATTAACGCATG | 67 | 722 |
| 916029 | 1866 | 1881 | 25629 | 25644 | AGGGACCCTCTGCACT | 15 | 723 |
| 916049 | 1890 | 1905 | 25653 | 25668 | AATAGGGCCACGAAAC | 52 | 724 |
| 916069 | 1920 | 1935 | 25683 | 25698 | AGAACCTCATGCTGGA | 85 | 725 |
| 916089 | 1963 | 1978 | 25726 | 25741 | CCCCATCACAAGGCCC | 20 | 726 |
| 916109 | 1985 | 2000 | 25748 | 25763 | ATCACACATGGGCCAG | 72 | 727 |
| 916129 | 2080 | 2095 | 25843 | 25858 | CCTGACAGGCAGTGTC | 15 | 728 |
| 916148 | 2108 | 2123 | 25871 | 25886 | TAGTCAAGGTTATCAT | 87 | 729 |
| 916168 | 2146 | 2161 | 25909 | 25924 | TTATCATCTTGTTACC | 82 | 730 |
| 916188 | 2279 | 2294 | 26042 | 26057 | CTTATTCTACTAACAT | 87 | 731 |
| 916208 | 2630 | 2645 | 26393 | 26408 | TGAATGCCCTGCACAC | 68 | 732 |
| 916228 | 2692 | 2707 | 26455 | 26470 | TGCTCCAGTGGAGAGG | 80 | 733 |
| 916248 | 2726 | 2741 | 26489 | 26504 | GTCCCTGCAGAAAATA | 0 | 734 |
| 916288 | N/A | N/A | 4337 | 4352 | AGCATACCACACCCCA | 75 | 735 |
| 916308 | N/A | N/A | 5086 | 5101 | GGACATGCTCAGCAGC | 68 | 736 |
| 916328 | N/A | N/A | 5533 | 5548 | TGCTGTAGGCCTCAGC | 0 | 737 |
| 916348 | N/A | N/A | 5874 | 5889 | TGGTAATACTTTTGGC | 86 | 738 |
| 916368 | N/A | N/A | 7132 | 7147 | GTAAATGGAGTCCTTC | 80 | 739 |
| 916388 | N/A | N/A | 7612 | 7627 | CATAATCCCCTTAACA | 32 | 740 |
| 916548 | N/A | N/A | 12195 | 12210 | TTAACCATCAAGGACA | 77 | 741 |
| 916568 | N/A | N/A | 12665 | 12680 | TCTTAGTGGCTGGGTA | 85 | 742 |
| 916588 | N/A | N/A | 12973 | 12988 | CCTAACAAACTTTGCA | 32 | 743 |
| 916608 | N/A | N/A | 13749 | 13764 | ACTAAGTGTTAGAACT | 76 | 744 |
| 916628 | N/A | N/A | 14338 | 14353 | CTGCAGTATCCCTAGC | 0 | 745 |
| 916648 | N/A | N/A | 15012 | 15027 | TCCCATCGGTCATTTC | 45 | 746 |
| 916668 | N/A | N/A | 15682 | 15697 | GAAACCACTATCATCA | 62 | 747 |
| 916688 | N/A | N/A | 16671 | 16686 | GTAATAGGCCAAGTCC | 0 | 748 |
| 916708 | N/A | N/A | 17327 | 17342 | CAAACTAATGCACCTG | 66 | 749 |
| 916728 | N/A | N/A | 18332 | 18347 | CCAATATCATAGCTGA | 85 | 750 |
| 916748 | N/A | N/A | 19376 | 19391 | CACAAGAGACTGGACC | 64 | 751 |
| 916767 | N/A | N/A | 20551 | 20566 | TACTATGGGATGAGTA | 0 | 752 |
| 916787 | N/A | N/A | 20779 | 20794 | TTTTAATCAAGTGCCC | 38 | 753 |
| 916807 | N/A | N/A | 21218 | 21233 | GGCAGGATGTAGCTGT | 63 | 754 |
| 916827 | N/A | N/A | 21947 | 21962 | AGTCAAACATCTTCCT | 50 | 755 |
| 916847 | N/A | N/A | 22759 | 22774 | CAGACTAACTTACTAA | 77 | 756 |
| 916867 | N/A | N/A | 23626 | 23641 | AGCTTACAACACTACC | 13 | 757 |
| 916887 | N/A | N/A | 24505 | 24520 | ATGCTACGGGCTCTCA | 0 | 758 |

TABLE 12
Inhibition of PNPLA3 mRNA by 3-10-3 cEt gapmers targeting SEQ ID NO: 1 and 2

| | SEQ | SEQ | SEQ | SEQ | | | |
|---|---|---|---|---|---|---|---|
| | ID | ID | ID | ID | | | |
| | NO: 1 | NO: 1 | NO: 2 | NO: 2 | | PNPLA3 | SEQ |
| Compound | Start | Stop | Start | Stop | | % | ID |
| Number | Site | Site | Site | Site | Sequence (5′ to 3′) | Inhibition | NO |
| 915350 | 30 | 45 | 2768 | 2783 | CAGGGCATTCCCAGCG | 0 | 759 |
| 915370 | 82 | 97 | 2820 | 2835 | CAGCTCCGCCCGGCGC | 14 | 760 |
| 915390 | 130 | 145 | 2868 | 2883 | TTAGGATCTGGGTCGG | 88 | 761 |
| 915410 | 201 | 216 | 2939 | 2954 | AGCCCGCGAAGGACAA | 0 | 762 |
| 915430 | 295 | 310 | 3033 | 3048 | GCGCCGAACAACATGC | 0 | 763 |
| 915450 | 366 | 381 | 5940 | 5955 | AGAGGACCTGCAGAGT | 83 | 764 |
| 915470 | 395 | 410 | 5969 | 5984 | CCGACTCCTGGCCTTC | 68 | 765 |
| 915490 | 436 | 451 | 6010 | 6025 | AACTTGCTTAAGTTGA | 41 | 766 |
| 915510 | 467 | 482 | 6041 | 6056 | CGGGAGGCATTTGCAG | 44 | 767 |
| 915530 | 497 | 512 | 6071 | 6086 | TTTGCCGGAGATGAGC | 92 | 768 |
| 915550 | 519 | 534 | 6093 | 6108 | CTCTGGTAAGAGAGAT | 20 | 769 |
| 915570 | 566 | 581 | 6140 | 6155 | GTCTTTGGACCGAAAG | 19 | 770 |
| 915590 | 627 | 642 | 7857 | 7872 | GAGGGATAAGGCCACT | 83 | 771 |
| 915610 | 706 | 721 | 11924 | 11939 | GTGATGGTTGTTTTGG | 97 | 772 |
| 915630 | 782 | 797 | 12000 | 12015 | GGTGATGTCCACATGA | 87 | 773 |
| 915650 | 834 | 849 | 12052 | 12067 | AAGCTCTCGAGAGAAG | 44 | 774 |
| 915670 | 887 | 902 | 13623 | 13638 | CAAATATCCTCGAAGG | 0 | 775 |
| 915690 | 970 | 985 | 16090 | 16105 | GGATCCATCCCTTCTG | 0 | 776 |
| 915710 | 1003 | 1018 | 16123 | 16138 | CTCATGTTTGCCCAGC | 68 | 777 |
| 915730 | 1078 | 1093 | 16198 | 16213 | AGACGCAGGTGGTCTA | 0 | 778 |
| 915750 | 1139 | 1154 | N/A | N/A | TGCTGTAGCGAGCCTG | 56 | 779 |
| 915770 | 1201 | 1216 | 19041 | 19056 | ATGGGTAGCAAGTTGC | 79 | 780 |
| 915790 | 1247 | 1262 | 19087 | 19102 | TTCCACAGGCAGGGTA | 48 | 781 |
| 915810 | 1320 | 1335 | 23725 | 23740 | ACTGCAACCACAGGAC | 22 | 782 |
| 915830 | 1356 | 1371 | 23761 | 23776 | ACATCAGCACTCGAGT | 0 | 783 |
| 915850 | 1427 | 1442 | 25190 | 25205 | CTGCTCAGGTGTGCAT | 10 | 784 |
| 915870 | 1512 | 1527 | 25275 | 25290 | ACCTGAGGATGGACCG | 69 | 785 |
| 915890 | 1557 | 1572 | 25320 | 25335 | CAGCACCAGCAGGTAC | 62 | 786 |
| 915910 | 1617 | 1632 | 25380 | 25395 | CTCCTCAAGTGACTCA | 83 | 787 |
| 915930 | 1648 | 1663 | 25411 | 25426 | TAGCACCTCTGAAAGA | 55 | 788 |
| 915950 | 1693 | 1708 | 25456 | 25471 | CACTACACAGCAATGC | 74 | 789 |
| 915970 | 1775 | 1790 | 25538 | 25553 | CACAGGCGAAAGGTTG | 72 | 790 |
| 915990 | 1797 | 1812 | 25560 | 25575 | AGAGTTAAGTGCTGGA | 92 | 791 |
| 916010 | 1824 | 1839 | 25587 | 25602 | AGCTGAATTAACGCAT | 0 | 792 |
| 916030 | 1867 | 1882 | 25630 | 25645 | AAGGGACCCTCTGCAC | 38 | 793 |
| 916050 | 1891 | 1906 | 25654 | 25669 | TAATAGGGCCACGAAA | 53 | 794 |
| 916070 | 1921 | 1936 | 25684 | 25699 | AAGAACCTCATGCTGG | 24 | 795 |
| 916090 | 1964 | 1979 | 25727 | 25742 | CCCCCATCACAAGGCC | 24 | 796 |
| 916110 | 1986 | 2001 | 25749 | 25764 | GATCACACATGGGCCA | 0 | 797 |
| 916130 | 2081 | 2096 | 25844 | 25859 | ACCTGACAGGCAGTGT | 54 | 798 |
| 916149 | 2109 | 2124 | 25872 | 25887 | GTAGTCAAGGTTATCA | 87 | 799 |
| 916169 | 2154 | 2169 | 25917 | 25932 | TAAGTAGATTATCATC | 79 | 800 |
| 916189 | 2282 | 2297 | 26045 | 26060 | AGGCTTATTCTACTAA | 85 | 801 |
| 916209 | 2631 | 2646 | 26394 | 26409 | GTGAATGCCCTGCACA | 59 | 802 |
| 916229 | 2693 | 2708 | 26456 | 26471 | GTGCTCCAGTGGAGAG | 54 | 803 |
| 916249 | 2727 | 2742 | 26490 | 26505 | GGTCCCTGCAGAAAAT | 38 | 804 |
| 916289 | N/A | N/A | 4338 | 4353 | AAGCATACCACACCCC | 79 | 805 |
| 916309 | N/A | N/A | 5278 | 5293 | AATCTTGGGATGCACA | 95 | 806 |
| 916329 | N/A | N/A | 5569 | 5584 | CATCATGGCTTCCAGT | 79 | 807 |
| 916349 | N/A | N/A | 5879 | 5894 | TGGGATGGTAATACTT | 0 | 808 |
| 916369 | N/A | N/A | 7134 | 7149 | AAGTAAATGGAGTCCT | 5 | 809 |
| 916389 | N/A | N/A | 7615 | 7630 | TTGCATAATCCCCTTA | 33 | 810 |
| 916409 | N/A | N/A | 8165 | 8180 | TTAACTAGATCACTGA | 58 | 811 |
| 916429 | N/A | N/A | 9109 | 9124 | TCCTAATGCGAGTCCC | 86 | 812 |
| 916449 | N/A | N/A | 9522 | 9537 | TGCTGCTGGGTGCACT | 45 | 813 |
| 916469 | N/A | N/A | 10199 | 10214 | GGTGATGACACAGCAT | 94 | 814 |
| 916489 | N/A | N/A | 10382 | 10397 | GCCATGTACAACTTTT | 52 | 815 |
| 916509 | N/A | N/A | 11152 | 11167 | TACAATTTGGACAGAG | 71 | 816 |
| 916529 | N/A | N/A | 11546 | 11561 | ACCTATAGGAGTGCCC | 35 | 817 |
| 916549 | N/A | N/A | 12204 | 12219 | TTATTTCCGTTAACCA | 97 | 818 |
| 916569 | N/A | N/A | 12672 | 12687 | AGAATCATCTTAGTGG | 94 | 819 |
| 916589 | N/A | N/A | 12989 | 13004 | CGGAATAAGCCTCCAC | 0 | 820 |
| 916609 | N/A | N/A | 13752 | 13767 | GGCACTAAGTGTTAGA | 57 | 821 |
| 916629 | N/A | N/A | 14375 | 14390 | TCTCACAAGGCTGGCA | 84 | 822 |
| 916649 | N/A | N/A | 15137 | 15152 | GCCATACCGGCTCCCT | 30 | 823 |
| 916669 | N/A | N/A | 15691 | 15706 | GGCCTTACAGAAACCA | 15 | 824 |
| 916689 | N/A | N/A | 16672 | 16687 | AGTAATAGGCCAAGTC | 16 | 825 |
| 916709 | N/A | N/A | 17328 | 17343 | ACAAACTAATGCACCT | 42 | 826 |
| 916729 | N/A | N/A | 18333 | 18348 | TCCAATATCATAGCTG | 32 | 827 |
| 916749 | N/A | N/A | 19445 | 19460 | CTACTAGGCATCTCTA | 32 | 828 |
| 916768 | N/A | N/A | 20553 | 20568 | CTTACTATGGGATGAG | 83 | 829 |
| 916788 | N/A | N/A | 20808 | 20823 | TAATATTCAGACCAGG | 94 | 830 |
| 916808 | N/A | N/A | 21252 | 21267 | CCATGCATGGCACAGT | 4 | 831 |
| 916828 | N/A | N/A | 21968 | 21983 | AGACAGGAATCCAACC | 0 | 832 |
| 916848 | N/A | N/A | 22767 | 22782 | GGACATGACAGACTAA | 96 | 833 |
| 916868 | N/A | N/A | 23637 | 23652 | GCAGACACAACAGCTT | 40 | 834 |
| 916888 | N/A | N/A | 24507 | 24522 | CCATGCTACGGGCTCT | 0 | 835 |

TABLE 13
Inhibition of PNPLA3 mRNA by 3-10-3 cEt gapmers targeting SEQ ID NO: 1 and 2

| | SEQ | SEQ | SEQ | SEQ | | | |
|---|---|---|---|---|---|---|---|
| | ID | ID | ID | ID | | | |
| | NO: 1 | NO: 1 | NO: 2 | NO: 2 | | PNPLA3 | SEQ |
| Compound | Start | Stop | Start | Stop | | % | ID |
| Number | Site | Site | Site | Site | Sequence (5′ to 3′) | Inhibition | NO |
| 915351 | 33 | 48 | 2771 | 2786 | GGCCAGGGCATTCCCA | 0 | 836 |
| 915371 | 83 | 98 | 2821 | 2836 | GCAGCTCCGCCCGGCG | 2 | 837 |
| 915391 | 132 | 147 | 2870 | 2885 | GGTTAGGATCTGGGTC | 54 | 838 |
| 915411 | 222 | 237 | 2960 | 2975 | GGTAGAAGCCCAGGAA | 57 | 839 |
| 915431 | 321 | 336 | 3059 | 3074 | CGACGCAGTGCAACGC | 49 | 840 |
| 915451 | 368 | 383 | 5942 | 5957 | TGAGAGGACCTGCAGA | 0 | 841 |
| 915471 | 400 | 415 | 5974 | 5989 | ATGTTCCGACTCCTGG | 82 | 842 |
| 915491 | 437 | 452 | 6011 | 6026 | GAACTTGCTTAAGTTG | 23 | 843 |
| 915511 | 468 | 483 | 6042 | 6057 | CCGGGAGGCATTTGCA | 0 | 844 |
| 915531 | 498 | 513 | 6072 | 6087 | TTTTGCCGGAGATGAG | 84 | 845 |
| 915551 | 520 | 535 | 6094 | 6109 | ACTCTGGTAAGAGAGA | 5 | 846 |
| 915571 | 567 | 582 | 6141 | 6156 | CGTCTTTGGACCGAAA | 64 | 847 |
| 915611 | 708 | 723 | 11926 | 11941 | CGGTGATGGTTGTTTT | 98 | 848 |
| 915631 | 783 | 798 | 12001 | 12016 | TGGTGATGTCCACATG | 0 | 849 |
| 915651 | 835 | 850 | 12053 | 12068 | AAAGCTCTCGAGAGAA | 35 | 850 |
| 915671 | 890 | 905 | 13626 | 13641 | ATCCAAATATCCTCGA | 42 | 851 |
| 915691 | 971 | 986 | 16091 | 16106 | AGGATCCATCCCTTCT | 0 | 852 |
| 915711 | 1005 | 1020 | 16125 | 16140 | GACTCATGTTTGCCCA | 73 | 853 |
| 915731 | 1079 | 1094 | 16199 | 16214 | GAGACGCAGGTGGTCT | 0 | 854 |
| 915751 | 1140 | 1155 | N/A | N/A | GTGCTGTAGCGAGCCT | 0 | 855 |
| 915771 | 1202 | 1217 | 19042 | 19057 | AATGGGTAGCAAGTTG | 80 | 856 |
| 915791 | 1248 | 1263 | 19088 | 19103 | ATTCCACAGGCAGGGT | 37 | 857 |

| | | | | | | | |
|---|---|---|---|---|---|---|---|
| 915811 | 1327 | 1342 | 23732 | 23747 | GTCACCCACTGCAACC | 52 | 858 |
| 915831 | 1357 | 1372 | 23762 | 23777 | CACATCAGCACTCGAG | 29 | 859 |
| 915851 | 1429 | 1444 | 25192 | 25207 | TCCTGCTCAGGTGTGC | 2 | 860 |
| 915871 | 1513 | 1528 | 25276 | 25291 | GACCTGAGGATGGACC | 20 | 861 |
| 915891 | 1558 | 1573 | 25321 | 25336 | TCAGCACCAGCAGGTA | 68 | 862 |
| 915911 | 1620 | 1635 | 25383 | 25398 | CGCCTCCTCAAGTGAC | 48 | 863 |
| 915931 | 1652 | 1667 | 25415 | 25430 | ACTTTAGCACCTCTGA | 93 | 864 |
| 915951 | 1695 | 1710 | 25458 | 25473 | GTCACTACACAGCAAT | 84 | 865 |
| 915971 | 1776 | 1791 | 25539 | 25554 | GCACAGGCGAAAGGTT | 74 | 866 |
| 915991 | 1798 | 1813 | 25561 | 25576 | TAGAGTTAAGTGCTGG | 84 | 867 |
| 916011 | 1825 | 1840 | 25588 | 25603 | CAGCTGAATTAACGCA | 0 | 868 |
| 916031 | 1868 | 1883 | 25631 | 25646 | TAAGGGACCCTCTGCA | 54 | 869 |
| 916051 | 1892 | 1907 | 25655 | 25670 | TTAATAGGGCCACGAA | 75 | 870 |
| 916071 | 1922 | 1937 | 25685 | 25700 | TAAGAACCTCATGCTG | 56 | 871 |
| 916091 | 1965 | 1980 | 25728 | 25743 | CCCCCCATCACAAGGC | 9 | 872 |
| 916111 | 1987 | 2002 | 25750 | 25765 | AGATCACACATGGGCC | 26 | 873 |
| 916131 | 2084 | 2099 | 25847 | 25862 | ACCACCTGACAGGCAG | 80 | 874 |
| 916150 | 2110 | 2125 | 25873 | 25888 | AGTAGTCAAGGTTATC | 92 | 875 |
| 916170 | 2174 | 2189 | 25937 | 25952 | TGAAAAAGGTGTTCTA | 49 | 876 |
| 916190 | 2283 | 2298 | 26046 | 26061 | AAGGCTTATTCTACTA | 79 | 877 |
| 916210 | 2633 | 2648 | 26396 | 26411 | AGGTGAATGCCCTGCA | 71 | 878 |
| 916230 | 2694 | 2709 | 26457 | 26472 | TGTGCTCCAGTGGAGA | 75 | 879 |
| 916250 | 2728 | 2743 | 26491 | 26506 | TGGTCCCTGCAGAAAA | 79 | 880 |
| 916290 | N/A | N/A | 4397 | 4412 | TGCCTACTGGCTCACA | 14 | 881 |
| 916310 | N/A | N/A | 5279 | 5294 | AAATCTTGGGATGCAC | 94 | 882 |
| 916330 | N/A | N/A | 5572 | 5587 | TGACATCATGGCTTCC | 93 | 883 |
| 916350 | N/A | N/A | 6158 | 6173 | GCTTACATCCACGACT | 0 | 884 |
| 916370 | N/A | N/A | 7135 | 7150 | CAAGTAAATGGAGTCC | 77 | 885 |
| 916390 | N/A | N/A | 7620 | 7635 | ATCTATTGCATAATCC | 86 | 886 |
| 916550 | N/A | N/A | 12205 | 12220 | TTTATTTCCGTTAACC | 96 | 887 |
| 916570 | N/A | N/A | 12694 | 12709 | TTCTTGACCGTGTTTC | 98 | 888 |
| 916590 | N/A | N/A | 12990 | 13005 | CCGGAATAAGCCTCCA | 47 | 889 |
| 916610 | N/A | N/A | 13822 | 13837 | TGTACAATGGGACGGA | 69 | 890 |
| 916630 | N/A | N/A | 14418 | 14433 | ATCGACACAGCATCAC | 92 | 891 |
| 916650 | N/A | N/A | 15138 | 15153 | TGCCATACCGGCTCCC | 0 | 892 |
| 916670 | N/A | N/A | 15758 | 15773 | GGTTTATAACAACTGA | 89 | 893 |
| 916690 | N/A | N/A | 16722 | 16737 | GCCTTGAGGTGGGTGG | 0 | 894 |
| 916710 | N/A | N/A | 17512 | 17527 | AGTCATGGGATGTGCA | 58 | 895 |
| 916730 | N/A | N/A | 18395 | 18410 | ATGTTTGGAAGTCGCC | 92 | 896 |
| 916750 | N/A | N/A | 19473 | 19488 | AAGGATCCTGCTTCTA | 9 | 897 |
| 916769 | N/A | N/A | 20554 | 20569 | GCTTACTATGGGATGA | 62 | 898 |
| 916789 | N/A | N/A | 20809 | 20824 | GTAATATTCAGACCAG | 96 | 2177 |
| 916809 | N/A | N/A | 21254 | 21269 | ATCCATGCATGGCACA | 72 | 900 |
| 916829 | N/A | N/A | 21979 | 21994 | GTCAGACACGGAGACA | 0 | 901 |
| 916849 | N/A | N/A | 23110 | 23125 | GGCTTTTGAAGGAGAG | 84 | 902 |
| 916869 | N/A | N/A | 23787 | 23802 | TATTTACCTGGAGGCG | 0 | 903 |
| 916889 | N/A | N/A | 24612 | 24627 | CAAATCGGATCTTTGC | 44 | 904 |

TABLE 14
Inhibition of PNPLA3 mRNA by 3-10-3 cEt gapmers targeting SEQ ID NO: 1 and 2

| | SEQ | SEQ | SEQ | SEQ | | | |
|---|---|---|---|---|---|---|---|
| | ID | ID | ID | ID | | | |
| | NO: 1 | NO: 1 | NO: 2 | NO: 2 | | PNPLA3 | SEQ |
| Compound | Start | Stop | Start | Stop | | % | ID |
| Number | Site | Site | Site | Site | Sequence (5′ to 3′) | Inhibition | NO |
| 915352 | 34 | 49 | 2772 | 2787 | CGGCCAGGGCATTCCC | 0 | 905 |
| 915372 | 86 | 101 | 2824 | 2839 | GCAGCAGCTCCGCCCG | 48 | 906 |
| 915392 | 135 | 150 | 2873 | 2888 | GCGGGTTAGGATCTGG | 25 | 907 |
| 915412 | 225 | 240 | 2963 | 2978 | CGTGGTAGAAGCCCAG | 2 | 908 |
| 915432 | 322 | 337 | 3060 | 3075 | CCGACGCAGTGCAACG | 31 | 909 |
| 915452 | 371 | 386 | 5945 | 5960 | ATCTGAGAGGACCTGC | 72 | 910 |
| 915472 | 401 | 416 | 5975 | 5990 | AATGTTCCGACTCCTG | 77 | 911 |
| 915492 | 438 | 453 | 6012 | 6027 | GGAACTTGCTTAAGTT | 55 | 912 |
| 915512 | 469 | 484 | 6043 | 6058 | GCCGGGAGGCATTTGC | 3 | 913 |
| 915532 | 499 | 514 | 6073 | 6088 | ATTTTGCCGGAGATGA | 86 | 914 |
| 915552 | 521 | 536 | 6095 | 6110 | CACTCTGGTAAGAGAG | 8 | 915 |
| 915612 | 709 | 724 | 11927 | 11942 | ACGGTGATGGTTGTTT | 87 | 916 |
| 915632 | 787 | 802 | 12005 | 12020 | AGCTTGGTGATGTCCA | 38 | 917 |
| 915652 | 836 | 851 | 12054 | 12069 | AAAAGCTCTCGAGAGA | 0 | 918 |
| 915672 | 891 | 906 | 13627 | 13642 | CATCCAAATATCCTCG | 82 | 919 |
| 915692 | 972 | 987 | 16092 | 16107 | CAGGATCCATCCCTTC | 0 | 920 |
| 915712 | 1006 | 1021 | 16126 | 16141 | AGACTCATGTTTGCCC | 77 | 921 |
| 915732 | 1081 | 1096 | 16201 | 16216 | CTGAGACGCAGGTGGT | 87 | 922 |
| 915752 | 1141 | 1156 | N/A | N/A | AGTGCTGTAGCGAGCC | 1 | 923 |
| 915772 | 1203 | 1218 | 19043 | 19058 | TAATGGGTAGCAAGTT | 77 | 924 |
| 915792 | 1257 | 1272 | 19097 | 19112 | CAATGGCAGATTCCAC | 56 | 925 |
| 915812 | 1328 | 1343 | 23733 | 23748 | GGTCACCCACTGCAAC | 58 | 926 |
| 915832 | 1358 | 1373 | 23763 | 23778 | ACACATCAGCACTCGA | 66 | 927 |
| 915852 | 1430 | 1445 | 25193 | 25208 | GTCCTGCTCAGGTGTG | 52 | 928 |
| 915872 | 1518 | 1533 | 25281 | 25296 | GGCTGGACCTGAGGAT | 0 | 929 |
| 915892 | 1570 | 1585 | 25333 | 25348 | GTGGAGAGCCCCTCAG | 47 | 930 |
| 915912 | 1621 | 1636 | 25384 | 25399 | TCGCCTCCTCAAGTGA | 8 | 931 |
| 915932 | 1654 | 1669 | 25417 | 25432 | AAACTTTAGCACCTCT | 90 | 932 |
| 915952 | 1696 | 1711 | 25459 | 25474 | GGTCACTACACAGCAA | 82 | 933 |
| 915972 | 1777 | 1792 | 25540 | 25555 | TGCACAGGCGAAAGGT | 64 | 934 |
| 915992 | 1799 | 1814 | 25562 | 25577 | TTAGAGTTAAGTGCTG | 91 | 935 |
| 916012 | 1826 | 1841 | 25589 | 25604 | CCAGCTGAATTAACGC | 32 | 936 |
| 916032 | 1869 | 1884 | 25632 | 25647 | GTAAGGGACCCTCTGC | 73 | 937 |
| 916052 | 1894 | 1909 | 25657 | 25672 | CATTAATAGGGCCACG | 81 | 938 |
| 916072 | 1923 | 1938 | 25686 | 25701 | CTAAGAACCTCATGCT | 70 | 939 |
| 916092 | 1966 | 1981 | 25729 | 25744 | ACCCCCCATCACAAGG | 30 | 940 |
| 916112 | 1988 | 2003 | 25751 | 25766 | AAGATCACACATGGGC | 86 | 941 |
| 916132 | 2085 | 2100 | 25848 | 25863 | GACCACCTGACAGGCA | 61 | 942 |
| 916151 | 2111 | 2126 | 25874 | 25889 | TAGTAGTCAAGGTTAT | 88 | 943 |
| 916171 | 2176 | 2191 | 25939 | 25954 | GGTGAAAAAGGTGTTC | 84 | 944 |
| 916191 | 2284 | 2299 | 26047 | 26062 | TAAGGCTTATTCTACT | 76 | 945 |
| 916211 | 2634 | 2649 | 26397 | 26412 | GAGGTGAATGCCCTGC | 0 | 946 |
| 916231 | 2695 | 2710 | 26458 | 26473 | GTGTGCTCCAGTGGAG | 87 | 947 |
| 916251 | 2729 | 2744 | 26492 | 26507 | CTGGTCCCTGCAGAAA | 67 | 948 |
| 916291 | N/A | N/A | 4419 | 4434 | CAATGCTACTTGCCCC | 68 | 949 |
| 916311 | N/A | N/A | 5280 | 5295 | TAAATCTTGGGATGCA | 94 | 950 |
| 916331 | N/A | N/A | 5576 | 5591 | ACAATGACATCATGGC | 97 | 951 |
| 916351 | N/A | N/A | 6165 | 6180 | GCAAACTGCTTACATC | 0 | 952 |
| 916371 | N/A | N/A | 7172 | 7187 | GTTAGACGCGCCAGGC | 7 | 953 |
| 916391 | N/A | N/A | 7624 | 7639 | TCTCATCTATTGCATA | 0 | 954 |
| 916551 | N/A | N/A | 12206 | 12221 | TTTTATTTCCGTTAAC | 73 | 955 |
| 916571 | N/A | N/A | 12714 | 12729 | TAAACTACCGAACGCA | 96 | 956 |
| 916591 | N/A | N/A | 12991 | 13006 | CCCGGAATAAGCCTCC | 47 | 957 |
| 916611 | N/A | N/A | 13823 | 13838 | CTGTACAATGGGACGG | 23 | 958 |
| 916631 | N/A | N/A | 14422 | 14437 | TCCCATCGACACAGCA | 95 | 959 |
| 916651 | N/A | N/A | 15206 | 15221 | GGAATATTGCCAGGTA | 95 | 960 |
| 916671 | N/A | N/A | 15759 | 15774 | TGGTTTATAACAACTG | 29 | 961 |
| 916691 | N/A | N/A | 16746 | 16761 | ATTAGGAGAGGTCTCA | 55 | 962 |
| 916711 | N/A | N/A | 17602 | 17617 | CTTGATAGTGAATGTG | 90 | 963 |
| 916731 | N/A | N/A | 18859 | 18874 | GGCACTCACAAAAGCG | 10 | 964 |
| 916751 | N/A | N/A | 20182 | 20197 | CCCTATGTTCTACTTT | 54 | 965 |
| 916770 | N/A | N/A | 20572 | 20587 | CAACATCTCTAGCTGG | 82 | 966 |
| 916790 | N/A | N/A | 20810 | 20825 | GGTAATATTCAGACCA | 0 | 967 |
| 916810 | N/A | N/A | 21265 | 21280 | TGAAGCTACAGATCCA | 74 | 968 |
| 916830 | N/A | N/A | 22042 | 22057 | GGAAATCTGTCAGAGC | 18 | 969 |
| 916850 | N/A | N/A | 23142 | 23157 | GAATCTAGGAAGGCGA | 77 | 970 |
| 916870 | N/A | N/A | 23789 | 23804 | AGTATTTACCTGGAGG | 0 | 971 |
| 916890 | N/A | N/A | 24738 | 24753 | AGCCTTAGGAAGCCTC | 16 | 972 |

TABLE 15
Inhibition of PNPLA3 mRNA by 3-10-3 cEt gapmers targeting SEQ ID NO: 1 and 2

| | SEQ | SEQ | SEQ | SEQ | | | |
|---|---|---|---|---|---|---|---|
| | ID | ID | ID | ID | | | |
| | NO: 1 | NO: 1 | NO: 2 | NO: 2 | | PNPLA3 | SEQ |
| Compound | Start | Stop | Start | Stop | | % | ID |
| Number | Site | Site | Site | Site | Sequence (5′ to 3′) | Inhibition | NO |
| 915353 | 35 | 50 | 2773 | 2788 | TCGGCCAGGGCATTCC | 0 | 973 |
| 915373 | 87 | 102 | 2825 | 2840 | CGCAGCAGCTCCGCCC | 0 | 974 |
| 915393 | 136 | 151 | 2874 | 2889 | CGCGGGTTAGGATCTG | 0 | 975 |
| 915413 | 239 | 254 | 2977 | 2992 | GCGGGTCGCCCCGACG | 0 | 976 |
| 915433 | 325 | 340 | 3063 | 3078 | ACGCCGACGCAGTGCA | 0 | 977 |
| 915453 | 372 | 387 | 5946 | 5961 | GATCTGAGAGGACCTG | 24 | 978 |
| 915473 | 402 | 417 | 5976 | 5991 | CAATGTTCCGACTCCT | 73 | 979 |
| 915493 | 441 | 456 | 6015 | 6030 | GGAGGAACTTGCTTAA | 87 | 980 |
| 915513 | 470 | 485 | 6044 | 6059 | GGCCGGGAGGCATTTG | 0 | 981 |
| 915533 | 500 | 515 | 6074 | 6089 | TATTTTGCCGGAGATG | 75 | 982 |
| 915553 | 522 | 537 | 6096 | 6111 | ACACTCTGGTAAGAGA | 0 | 983 |
| 915613 | 710 | 725 | 11928 | 11943 | CACGGTGATGGTTGTT | 64 | 984 |
| 915633 | 788 | 803 | 12006 | 12021 | GAGCTTGGTGATGTCC | 74 | 985 |
| 915653 | 837 | 852 | 12055 | 12070 | CAAAAGCTCTCGAGAG | 0 | 986 |
| 915673 | 892 | 907 | 13628 | 13643 | GCATCCAAATATCCTC | 81 | 987 |
| 915693 | 973 | 988 | 16093 | 16108 | TCAGGATCCATCCCTT | 10 | 988 |
| 915713 | 1007 | 1022 | 16127 | 16142 | CAGACTCATGTTTGCC | 0 | 989 |
| 915733 | 1082 | 1097 | 16202 | 16217 | GCTGAGACGCAGGTGG | 64 | 990 |
| 915753 | 1142 | 1157 | N/A | N/A | CAGTGCTGTAGCGAGC | 0 | 991 |
| 915773 | 1204 | 1219 | 19044 | 19059 | CTAATGGGTAGCAAGT | 72 | 992 |
| 915793 | 1258 | 1273 | 19098 | 19113 | GCAATGGCAGATTCCA | 57 | 993 |
| 915813 | 1329 | 1344 | 23734 | 23749 | AGGTCACCCACTGCAA | 56 | 994 |
| 915833 | 1359 | 1374 | 23764 | 23779 | GACACATCAGCACTCG | 43 | 995 |
| 915853 | 1431 | 1446 | 25194 | 25209 | AGTCCTGCTCAGGTGT | 66 | 996 |
| 915873 | 1525 | 1540 | 25288 | 25303 | AAGTTCAGGCTGGACC | 54 | 997 |
| 915893 | 1571 | 1586 | 25334 | 25349 | GGTGGAGAGCCCCTCA | 0 | 998 |
| 915913 | 1622 | 1637 | 25385 | 25400 | CTCGCCTCCTCAAGTG | 52 | 999 |
| 915933 | 1660 | 1675 | 25423 | 25438 | GATGGGAAACTTTAGC | 85 | 1000 |
| 915953 | 1697 | 1712 | 25460 | 25475 | GGGTCACTACACAGCA | 78 | 1001 |
| 915973 | 1778 | 1793 | 25541 | 25556 | CTGCACAGGCGAAAGG | 35 | 1002 |
| 915993 | 1800 | 1815 | 25563 | 25578 | ATTAGAGTTAAGTGCT | 63 | 1003 |
| 916013 | 1827 | 1842 | 25590 | 25605 | ACCAGCTGAATTAACG | 66 | 1004 |
| 916033 | 1873 | 1888 | 25636 | 25651 | GTCAGTAAGGGACCCT | 52 | 1005 |
| 916053 | 1897 | 1912 | 25660 | 25675 | GACCATTAATAGGGCC | 51 | 1006 |
| 916073 | 1924 | 1939 | 25687 | 25702 | TCTAAGAACCTCATGC | 55 | 1007 |
| 916093 | 1967 | 1982 | 25730 | 25745 | TACCCCCCATCACAAG | 15 | 1008 |
| 916113 | 1990 | 2005 | 25753 | 25768 | ACAAGATCACACATGG | 72 | 1009 |
| 916133 | 2086 | 2101 | 25849 | 25864 | AGACCACCTGACAGGC | 79 | 1010 |
| 916152 | 2112 | 2127 | 25875 | 25890 | TTAGTAGTCAAGGTTA | 84 | 1011 |
| 916172 | 2177 | 2192 | 25940 | 25955 | AGGTGAAAAAGGTGTT | 88 | 1012 |
| 916192 | 2285 | 2300 | 26048 | 26063 | TTAAGGCTTATTCTAC | 82 | 1013 |
| 916212 | 2635 | 2650 | 26398 | 26413 | TGAGGTGAATGCCCTG | 58 | 1014 |
| 916232 | 2696 | 2711 | 26459 | 26474 | TGTGTGCTCCAGTGGA | 89 | 1015 |
| 916252 | 2730 | 2745 | 26493 | 26508 | GCTGGTCCCTGCAGAA | 44 | 1016 |
| 916272 | N/A | N/A | 3328 | 3343 | GGGACGCACGAGAGTC | 0 | 1017 |
| 916292 | N/A | N/A | 4432 | 4447 | GTCAATAGCTTCACAA | 86 | 1018 |
| 916312 | N/A | N/A | 5281 | 5296 | ATAAATCTTGGGATGC | 92 | 1019 |
| 916332 | N/A | N/A | 5577 | 5592 | CACAATGACATCATGG | 95 | 1020 |
| 916352 | N/A | N/A | 6170 | 6185 | GATAAGCAAACTGCTT | 19 | 1021 |
| 916372 | N/A | N/A | 7192 | 7207 | GAGGATGCAACTGGCT | 84 | 1022 |
| 916392 | N/A | N/A | 7644 | 7659 | TCGGACTTCAGGCCCA | 0 | 1023 |
| 916552 | N/A | N/A | 12208 | 12223 | CCTTTTATTTCCGTTA | 97 | 1024 |
| 916572 | N/A | N/A | 12745 | 12760 | GCATACTAAAACCACC | 85 | 1025 |
| 916592 | N/A | N/A | 13375 | 13390 | GACTTTGCAGGCACCC | 92 | 1026 |
| 916612 | N/A | N/A | 13909 | 13924 | TGACATCCCAGTTCAA | 30 | 1027 |
| 916632 | N/A | N/A | 14427 | 14442 | TACTTTCCCATCGACA | 81 | 1028 |
| 916652 | N/A | N/A | 15207 | 15222 | AGGAATATTGCCAGGT | 88 | 1029 |
| 916672 | N/A | N/A | 15768 | 15783 | GGTTAGTGTTGGTTTA | 92 | 1030 |
| 916692 | N/A | N/A | 16790 | 16805 | CATTCGATGGAGGTTC | 58 | 1031 |
| 916712 | N/A | N/A | 17629 | 17644 | GGCGGATTTCCCCACT | 11 | 1032 |
| 916732 | N/A | N/A | 18894 | 18909 | TAAAATACGCCCGTCC | 7 | 1033 |
| 916752 | N/A | N/A | 20183 | 20198 | TCCCTATGTTCTACTT | 32 | 1034 |
| 916771 | N/A | N/A | 20574 | 20589 | ATCAACATCTCTAGCT | 46 | 1035 |
| 916791 | N/A | N/A | 20811 | 20826 | GGGTAATATTCAGACC | 43 | 1036 |
| 916811 | N/A | N/A | 21313 | 21328 | TTTACTAGAGACTCTG | 69 | 1037 |
| 916831 | N/A | N/A | 22071 | 22086 | GTAGGATAGGACTAGA | 45 | 1038 |
| 916851 | N/A | N/A | 23219 | 23234 | ATAAATGCCTGACCAC | 64 | 1039 |
| 916871 | N/A | N/A | 23861 | 23876 | TGTTTCTAGAATGTCG | 68 | 1040 |
| 916891 | N/A | N/A | 24873 | 24888 | GCCTATCAGTTTCCCC | 0 | 1041 |

TABLE 16
Inhibition of PNPLA3 mRNA by 3-10-3 cEt gapmers targeting SEQ ID NO: 1 and 2

| | SEQ | SEQ | SEQ | SEQ | | | |
|---|---|---|---|---|---|---|---|
| | ID | ID | ID | ID | | | |
| | NO: 1 | NO: 1 | NO: 2 | NO: 2 | | PNPLA3 | SEQ |
| Compound | Start | Stop | Start | Stop | | % | ID |
| Number | Site | Site | Site | Site | Sequence (5′ to 3′) | Inhibition | NO |
| 915354 | 36 | 51 | 2774 | 2789 | CTCGGCCAGGGCATTC | 0 | 1042 |
| 915374 | 89 | 104 | 2827 | 2842 | TCCGCAGCAGCTCCGC | 60 | 1043 |
| 915394 | 137 | 152 | 2875 | 2890 | GCGCGGGTTAGGATCT | 0 | 1044 |
| 915414 | 240 | 255 | 2978 | 2993 | AGCGGGTCGCCCCGAC | 21 | 1045 |
| 915434 | 337 | 352 | 3075 | 3090 | ATACCGGAGAGGACGC | 85 | 1046 |
| 915454 | 374 | 389 | 5948 | 5963 | AAGATCTGAGAGGACC | 24 | 1047 |
| 915474 | 403 | 418 | 5977 | 5992 | CCAATGTTCCGACTCC | 95 | 1048 |
| 915494 | 442 | 457 | 6016 | 6031 | CGGAGGAACTTGCTTA | 93 | 1049 |
| 915514 | 471 | 486 | 6045 | 6060 | TGGCCGGGAGGCATTT | 0 | 1050 |
| 915534 | 501 | 516 | 6075 | 6090 | CTATTTTGCCGGAGAT | 87 | 1051 |
| 915554 | 523 | 538 | 6097 | 6112 | GACACTCTGGTAAGAG | 26 | 1052 |
| 915614 | 711 | 726 | 11929 | 11944 | ACACGGTGATGGTTGT | 46 | 1053 |
| 915634 | 791 | 806 | 12009 | 12024 | ACTGAGCTTGGTGATG | 87 | 1054 |
| 915654 | 838 | 853 | 12056 | 12071 | ACAAAAGCTCTCGAGA | 0 | 1055 |
| 915674 | 900 | 915 | 13636 | 13651 | ACCTGAATGCATCCAA | 93 | 1056 |
| 915694 | 974 | 989 | 16094 | 16109 | CTCAGGATCCATCCCT | 43 | 1057 |
| 915714 | 1008 | 1023 | 16128 | 16143 | CCAGACTCATGTTTGC | 0 | 1058 |
| 915734 | 1083 | 1098 | 16203 | 16218 | TGCTGAGACGCAGGTG | 50 | 1059 |
| 915754 | 1143 | 1158 | N/A | N/A | TCAGTGCTGTAGCGAG | 42 | 1060 |
| 915774 | 1208 | 1223 | 19048 | 19063 | TATCCTAATGGGTAGC | 53 | 1061 |
| 915794 | 1260 | 1275 | 19100 | 19115 | TCGCAATGGCAGATTC | 67 | 1062 |
| 915814 | 1333 | 1348 | 23738 | 23753 | TGTGAGGTCACCCACT | 0 | 1063 |
| 915834 | 1360 | 1375 | 23765 | 23780 | AGACACATCAGCACTC | 24 | 1064 |
| 915854 | 1432 | 1447 | 25195 | 25210 | CAGTCCTGCTCAGGTG | 54 | 1065 |
| 915874 | 1526 | 1541 | 25289 | 25304 | GAAGTTCAGGCTGGAC | 75 | 1066 |
| 915894 | 1572 | 1587 | 25335 | 25350 | AGGTGGAGAGCCCCTC | 0 | 1067 |
| 915914 | 1623 | 1638 | 25386 | 25401 | ACTCGCCTCCTCAAGT | 0 | 1068 |
| 915934 | 1661 | 1676 | 25424 | 25439 | AGATGGGAAACTTTAG | 84 | 1069 |
| 915954 | 1724 | 1739 | 25487 | 25502 | GGCTGGGATCCTCCAC | 24 | 1070 |
| 915974 | 1779 | 1794 | 25542 | 25557 | GCTGCACAGGCGAAAG | 56 | 1071 |
| 915994 | 1801 | 1816 | 25564 | 25579 | TATTAGAGTTAAGTGC | 75 | 1072 |
| 916014 | 1828 | 1843 | 25591 | 25606 | AACCAGCTGAATTAAC | 55 | 1073 |
| 916034 | 1875 | 1890 | 25638 | 25653 | CAGTCAGTAAGGGACC | 70 | 1074 |
| 916054 | 1898 | 1913 | 25661 | 25676 | TGACCATTAATAGGGC | 74 | 1075 |
| 916074 | 1925 | 1940 | 25688 | 25703 | TTCTAAGAACCTCATG | 22 | 1076 |
| 916094 | 1968 | 1983 | 25731 | 25746 | CTACCCCCCATCACAA | 0 | 1077 |
| 916114 | 1992 | 2007 | 25755 | 25770 | CCACAAGATCACACAT | 0 | 1078 |
| 916134 | 2087 | 2102 | 25850 | 25865 | CAGACCACCTGACAGG | 78 | 1079 |
| 916153 | 2113 | 2128 | 25876 | 25891 | TTTAGTAGTCAAGGTT | 93 | 1080 |
| 916173 | 2178 | 2193 | 25941 | 25956 | TAGGTGAAAAAGGTGT | 89 | 1081 |
| 916193 | 2306 | 2321 | 26069 | 26084 | ACCCAACCGATTTTTT | 61 | 1082 |
| 916213 | 2636 | 2651 | 26399 | 26414 | CTGAGGTGAATGCCCT | 73 | 1083 |
| 916233 | 2697 | 2712 | 26460 | 26475 | TTGTGTGCTCCAGTGG | 92 | 1084 |
| 916253 | 2746 | 2761 | 26509 | 26524 | TCACTGACCATGTGGG | 16 | 1085 |
| 916273 | N/A | N/A | 3362 | 3377 | CTTCATGCACGGGCGC | 37 | 1086 |
| 916293 | N/A | N/A | 4462 | 4477 | GCATAATCTCCTGCCT | 0 | 1087 |
| 916313 | N/A | N/A | 5284 | 5299 | GCCATAAATCTTGGGA | 37 | 1088 |
| 916333 | N/A | N/A | 5605 | 5620 | CTTTATTCAATGTGGC | 97 | 2173 |
| 916353 | N/A | N/A | 6529 | 6544 | TACAACTGCCTGTGTT | 0 | 1090 |
| 916373 | N/A | N/A | 7218 | 7233 | AAAGCTTCCGCAAACA | 51 | 1091 |
| 916393 | N/A | N/A | 7657 | 7672 | CTAACATACACCCTCG | 0 | 1092 |
| 916553 | N/A | N/A | 12225 | 12240 | AGCTTCTGGGACAAGC | 10 | 1093 |
| 916573 | N/A | N/A | 12746 | 12761 | GGCATACTAAAACCAC | 55 | 1094 |
| 916593 | N/A | N/A | 13397 | 13412 | TTGAATGTCACCCTTC | 91 | 1095 |
| 916613 | N/A | N/A | 13914 | 13929 | AGTCATGACATCCCAG | 93 | 1096 |
| 916633 | N/A | N/A | 14442 | 14457 | TCTCATTGGCACCTGT | 86 | 1097 |
| 916653 | N/A | N/A | 15252 | 15267 | CCCTATCAGATGCCCT | 81 | 1098 |
| 916673 | N/A | N/A | 15799 | 15814 | CATATCTGGTTTCATG | 0 | 1099 |
| 916693 | N/A | N/A | 16842 | 16857 | GACCATAGCACTGTCT | 0 | 1100 |
| 916713 | N/A | N/A | 17737 | 17752 | ATTAATCTGGTCATAT | 0 | 1101 |
| 916733 | N/A | N/A | 18898 | 18913 | TCCATAAAATACGCCC | 69 | 1102 |
| 916753 | N/A | N/A | 20195 | 20210 | GAAAGATGGAATTCCC | 86 | 1103 |
| 916772 | N/A | N/A | 20604 | 20619 | TACGATCATCATTATT | 91 | 1104 |
| 916792 | N/A | N/A | 20841 | 20856 | GTATTAGCTCAATATT | 0 | 1105 |
| 916812 | N/A | N/A | 21314 | 21329 | GTTTACTAGAGACTCT | 64 | 1106 |
| 916832 | N/A | N/A | 22080 | 22095 | GTAAAAACTGTAGGAT | 0 | 1107 |
| 916852 | N/A | N/A | 23220 | 23235 | GATAAATGCCTGACCA | 29 | 1108 |
| 916872 | N/A | N/A | 24011 | 24026 | CCGACGGGAAGTCTTC | 0 | 1109 |
| 916892 | N/A | N/A | 24874 | 24889 | GGCCTATCAGTTTCCC | 0 | 1110 |

TABLE 17
Inhibition of PNPLA3 mRNA by 3-10-3 cEt gapmers targeting SEQ ID NO: 1 and 2

| | SEQ | SEQ | SEQ | SEQ | | | |
|---|---|---|---|---|---|---|---|
| | ID | ID | ID | ID | | | |
| | NO: 1 | NO: 1 | NO: 2 | NO: 2 | | PNPLA3 | SEQ |
| Compound | Start | Stop | Start | Stop | | % | ID |
| Number | Site | Site | Site | Site | Sequence (5′ to 3′) | Inhibition | NO |
| 915355 | 37 | 52 | 2775 | 2790 | TCTCGGCCAGGGCATT | 0 | 1111 |
| 915375 | 90 | 105 | 2828 | 2843 | ATCCGCAGCAGCTCCG | 52 | 1112 |
| 915395 | 138 | 153 | 2876 | 2891 | GGCGCGGGTTAGGATC | 0 | 1113 |
| 915415 | 241 | 256 | 2979 | 2994 | CAGCGGGTCGCCCCGA | 8 | 1114 |
| 915435 | 338 | 353 | 3076 | 3091 | GATACCGGAGAGGACG | 30 | 1115 |
| 915455 | 378 | 393 | 5952 | 5967 | GCACAAGATCTGAGAG | 72 | 1116 |
| 915475 | 405 | 420 | 5979 | 5994 | TGCCAATGTTCCGACT | 0 | 1117 |
| 915495 | 443 | 458 | 6017 | 6032 | TCGGAGGAACTTGCTT | 69 | 1118 |
| 915515 | 472 | 487 | 6046 | 6061 | TTGGCCGGGAGGCATT | 9 | 1119 |
| 915535 | 502 | 517 | 6076 | 6091 | CCTATTTTGCCGGAGA | 96 | 1120 |
| 915555 | 524 | 539 | 6098 | 6113 | AGACACTCTGGTAAGA | 2 | 1121 |
| 915615 | 712 | 727 | 11930 | 11945 | GACACGGTGATGGTTG | 32 | 1122 |
| 915635 | 792 | 807 | 12010 | 12025 | GACTGAGCTTGGTGAT | 93 | 1123 |
| 915655 | 839 | 854 | 12057 | 12072 | GACAAAAGCTCTCGAG | 40 | 1124 |
| 915675 | 901 | 916 | 13637 | 13652 | AACCTGAATGCATCCA | 92 | 1125 |
| 915695 | 975 | 990 | 16095 | 16110 | CCTCAGGATCCATCCC | 0 | 1126 |
| 915715 | 1011 | 1026 | 16131 | 16146 | AATCCAGACTCATGTT | 67 | 1127 |
| 915735 | 1088 | 1103 | 16208 | 16223 | CAGGATGCTGAGACGC | 86 | 1128 |
| 915755 | 1144 | 1159 | N/A | N/A | CTCAGTGCTGTAGCGA | 25 | 1129 |
| 915775 | 1209 | 1224 | 19049 | 19064 | TTATCCTAATGGGTAG | 23 | 1130 |
| 915795 | 1261 | 1276 | 19101 | 19116 | ATCGCAATGGCAGATT | 0 | 1131 |
| 915815 | 1337 | 1352 | 23742 | 23757 | CACCTGTGAGGTCACC | 35 | 1132 |
| 915835 | 1361 | 1376 | 23766 | 23781 | CAGACACATCAGCACT | 54 | 1133 |
| 915855 | 1433 | 1448 | 25196 | 25211 | CCAGTCCTGCTCAGGT | 23 | 1134 |
| 915875 | 1530 | 1545 | 25293 | 25308 | AGAAGAAGTTCAGGCT | 81 | 1135 |
| 915895 | 1574 | 1589 | 25337 | 25352 | AAAGGTGGAGAGCCCC | 76 | 1136 |
| 915915 | 1624 | 1639 | 25387 | 25402 | GACTCGCCTCCTCAAG | 75 | 1137 |
| 915935 | 1674 | 1689 | 25437 | 25452 | GGTAGCTGCACAAAGA | 76 | 1138 |
| 915955 | 1726 | 1741 | 25489 | 25504 | GAGGCTGGGATCCTCC | 0 | 1139 |
| 915975 | 1780 | 1795 | 25543 | 25558 | CGCTGCACAGGCGAAA | 0 | 1140 |
| 915995 | 1805 | 1820 | 25568 | 25583 | GATGTATTAGAGTTAA | 82 | 1141 |
| 916015 | 1829 | 1844 | 25592 | 25607 | CAACCAGCTGAATTAA | 59 | 1142 |
| 916035 | 1876 | 1891 | 25639 | 25654 | ACAGTCAGTAAGGGAC | 81 | 1143 |
| 916055 | 1899 | 1914 | 25662 | 25677 | CTGACCATTAATAGGG | 49 | 1144 |
| 916075 | 1929 | 1944 | 25692 | 25707 | GTCATTCTAAGAACCT | 81 | 1145 |
| 916095 | 1969 | 1984 | 25732 | 25747 | CCTACCCCCCATCACA | 21 | 1146 |
| 916115 | 1995 | 2010 | 25758 | 25773 | ACCCCACAAGATCACA | 0 | 1147 |
| 916135 | 2088 | 2103 | 25851 | 25866 | GCAGACCACCTGACAG | 44 | 1148 |
| 916154 | 2131 | 2146 | 25894 | 25909 | CCCCGCCATGGAGACG | 68 | 1149 |
| 916174 | 2180 | 2195 | 25943 | 25958 | GTTAGGTGAAAAAGGT | 90 | 1150 |
| 916194 | 2308 | 2323 | 26071 | 26086 | GCACCCAACCGATTTT | 83 | 1151 |
| 916214 | 2637 | 2652 | 26400 | 26415 | GCTGAGGTGAATGCCC | 52 | 1152 |
| 916234 | 2698 | 2713 | 26461 | 26476 | GTTGTGTGCTCCAGTG | 88 | 1153 |
| 916254 | 2747 | 2762 | 26510 | 26525 | CTCACTGACCATGTGG | 13 | 1154 |
| 916274 | N/A | N/A | 3524 | 3539 | GCAAATCGGCCCCTCG | 3 | 1155 |
| 916294 | N/A | N/A | 4463 | 4478 | GGCATAATCTCCTGCC | 0 | 1156 |
| 916314 | N/A | N/A | 5324 | 5339 | TGGCATGCAAGACCAC | 0 | 1157 |
| 916334 | N/A | N/A | 5606 | 5621 | ACTTTATTCAATGTGG | 95 | 1158 |
| 916354 | N/A | N/A | 6556 | 6571 | GTTTATGTCACTCTGG | 68 | 1159 |
| 916374 | N/A | N/A | 7245 | 7260 | GAACAGACAAGTGCTG | 38 | 1160 |
| 916394 | N/A | N/A | 7658 | 7673 | ACTAACATACACCCTC | 31 | 1161 |
| 916554 | N/A | N/A | 12249 | 12264 | ATAATCAGGGTGGTGC | 0 | 1162 |
| 916574 | N/A | N/A | 12747 | 12762 | AGGCATACTAAAACCA | 47 | 1163 |
| 916594 | N/A | N/A | 13500 | 13515 | GAATCATGCAAGCTCT | 50 | 1164 |
| 916614 | N/A | N/A | 13996 | 14011 | TAAACTAAGGGTCACA | 37 | 1165 |
| 916634 | N/A | N/A | 14497 | 14512 | ATCCATCCTGCATGAG | 76 | 1166 |
| 916654 | N/A | N/A | 15254 | 15269 | GGCCCTATCAGATGCC | 0 | 1167 |
| 916674 | N/A | N/A | 15802 | 15817 | CTACATATCTGGTTTC | 0 | 1168 |
| 916694 | N/A | N/A | 16844 | 16859 | TGGACCATAGCACTGT | 60 | 1169 |
| 916714 | N/A | N/A | 17738 | 17753 | TATTAATCTGGTCATA | 18 | 1170 |
| 916734 | N/A | N/A | 18926 | 18941 | CCACTTTACTCTGTTG | 64 | 1171 |
| 916754 | N/A | N/A | 20210 | 20225 | AACTATGCCTAGAACG | 43 | 1172 |
| 916773 | N/A | N/A | 20606 | 20621 | TTTACGATCATCATTA | 77 | 1173 |
| 916793 | N/A | N/A | 20842 | 20857 | TGTATTAGCTCAATAT | 0 | 1174 |
| 916813 | N/A | N/A | 21319 | 21334 | TGGGAGTTTACTAGAG | 66 | 1175 |
| 916833 | N/A | N/A | 22118 | 22133 | AGAGAGTACTCTTGGA | 11 | 1176 |
| 916853 | N/A | N/A | 23222 | 23237 | CTGATAAATGCCTGAC | 78 | 1177 |
| 916873 | N/A | N/A | 24038 | 24053 | ATCAATGCTGCACTCA | 88 | 1178 |
| 916893 | N/A | N/A | 24889 | 24904 | ACGAATCCCTGGAGGG | 0 | 1179 |

TABLE 18
Inhibition of PNPLA3 mRNA by 3-10-3 cEt gapmers targeting SEQ ID NO: 1 and 2

| | SEQ | SEQ | SEQ | SEQ | | | |
|---|---|---|---|---|---|---|---|
| | ID | ID | ID | ID | | | |
| | NO: 1 | NO: 1 | NO: 2 | NO: 2 | | PNPLA3 | SEQ |
| Compound | Start | Stop | Start | Stop | | % | ID |
| Number | Site | Site | Site | Site | Sequence (5′ to 3′) | Inhibition | NO |
| 915356 | 38 | 53 | 2776 | 2791 | GTCTCGGCCAGGGCAT | 0 | 1180 |
| 915376 | 93 | 108 | 2831 | 2846 | CTGATCCGCAGCAGCT | 28 | 1181 |
| 915396 | 165 | 180 | 2903 | 2918 | CGTACATGGCGGCGGC | 0 | 1182 |
| 915416 | 242 | 257 | 2980 | 2995 | GCAGCGGGTCGCCCCG | 0 | 1183 |
| 915436 | 339 | 354 | 3077 | 3092 | GGATACCGGAGAGGAC | 64 | 1184 |
| 915456 | 379 | 394 | 5953 | 5968 | CGCACAAGATCTGAGA | 79 | 1185 |
| 915476 | 406 | 421 | 5980 | 5995 | ATGCCAATGTTCCGAC | 83 | 1186 |
| 915496 | 444 | 459 | 6018 | 6033 | GTCGGAGGAACTTGCT | 35 | 1187 |
| 915516 | 473 | 488 | 6047 | 6062 | ATTGGCCGGGAGGCAT | 0 | 1188 |
| 915536 | 503 | 518 | 6077 | 6092 | GCCTATTTTGCCGGAG | 77 | 1189 |
| 915556 | 525 | 540 | 6099 | 6114 | CAGACACTCTGGTAAG | 62 | 1190 |
| 915616 | 730 | 745 | 11948 | 11963 | TACTCCCCATAGAAGG | 8 | 1191 |
| 915636 | 794 | 809 | 12012 | 12027 | TAGACTGAGCTTGGTG | 90 | 1192 |
| 915656 | 840 | 855 | 12058 | 12073 | GGACAAAAGCTCTCGA | 60 | 1193 |
| 915676 | 902 | 917 | 13638 | 13653 | GAACCTGAATGCATCC | 72 | 1194 |
| 915696 | 978 | 993 | 16098 | 16113 | CGACCTCAGGATCCAT | 0 | 1195 |
| 915716 | 1012 | 1027 | 16132 | 16147 | GAATCCAGACTCATGT | 0 | 1196 |
| 915736 | 1089 | 1104 | 16209 | 16224 | GCAGGATGCTGAGACG | 55 | 1197 |
| 915756 | 1145 | 1160 | N/A | N/A | ACTCAGTGCTGTAGCG | 12 | 1198 |
| 915776 | 1210 | 1225 | 19050 | 19065 | ATTATCCTAATGGGTA | 28 | 1199 |
| 915796 | 1262 | 1277 | 19102 | 19117 | AATCGCAATGGCAGAT | 0 | 1200 |
| 915816 | 1339 | 1354 | 23744 | 23759 | AACACCTGTGAGGTCA | 56 | 1201 |
| 915836 | 1365 | 1380 | 23770 | 23785 | GGAGCAGACACATCAG | 53 | 1202 |
| 915856 | 1434 | 1449 | 25197 | 25212 | GCCAGTCCTGCTCAGG | 21 | 1203 |
| 915876 | 1531 | 1546 | 25294 | 25309 | AAGAAGAAGTTCAGGC | 85 | 1204 |
| 915896 | 1575 | 1590 | 25338 | 25353 | GAAAGGTGGAGAGCCC | 78 | 1205 |
| 915916 | 1626 | 1641 | 25389 | 25404 | TAGACTCGCCTCCTCA | 32 | 1206 |
| 915936 | 1676 | 1691 | 25439 | 25454 | GAGGTAGCTGCACAAA | 91 | 1207 |
| 915956 | 1737 | 1752 | 25500 | 25515 | AACTCAGCTCAGAGGC | 46 | 1208 |
| 915976 | 1781 | 1796 | 25544 | 25559 | CCGCTGCACAGGCGAA | 0 | 1209 |
| 915996 | 1807 | 1822 | 25570 | 25585 | CTGATGTATTAGAGTT | 93 | 1210 |
| 916016 | 1830 | 1845 | 25593 | 25608 | CCAACCAGCTGAATTA | 21 | 1211 |
| 916036 | 1877 | 1892 | 25640 | 25655 | AACAGTCAGTAAGGGA | 82 | 1212 |
| 916056 | 1900 | 1915 | 25663 | 25678 | TCTGACCATTAATAGG | 13 | 1213 |
| 916076 | 1930 | 1945 | 25693 | 25708 | TGTCATTCTAAGAACC | 40 | 1214 |
| 916096 | 1970 | 1985 | 25733 | 25748 | GCCTACCCCCCATCAC | 18 | 1215 |
| 916116 | 1996 | 2011 | 25759 | 25774 | CACCCCACAAGATCAC | 50 | 1216 |
| 916136 | 2089 | 2104 | 25852 | 25867 | TGCAGACCACCTGACA | 58 | 1217 |
| 916155 | 2132 | 2147 | 25895 | 25910 | CCCCCGCCATGGAGAC | 33 | 1218 |
| 916175 | 2224 | 2239 | 25987 | 26002 | CGCTTCCTTACATTTT | 89 | 1219 |
| 916195 | 2309 | 2324 | 26072 | 26087 | TGCACCCAACCGATTT | 64 | 1220 |
| 916215 | 2638 | 2653 | 26401 | 26416 | GGCTGAGGTGAATGCC | 0 | 1221 |
| 916235 | 2699 | 2714 | 26462 | 26477 | AGTTGTGTGCTCCAGT | 85 | 1222 |
| 916255 | 2748 | 2763 | 26511 | 26526 | ACTCACTGACCATGTG | 0 | 1223 |
| 916275 | N/A | N/A | 3555 | 3570 | GGCCAAAGCCCCACTC | 0 | 1224 |
| 916295 | N/A | N/A | 4464 | 4479 | GGGCATAATCTCCTGC | 0 | 1225 |
| 916315 | N/A | N/A | 5342 | 5357 | GGCTGATCTGCACTCT | 84 | 1226 |
| 916335 | N/A | N/A | 5626 | 5641 | TAATTCTACCTGTGTC | 92 | 1227 |
| 916355 | N/A | N/A | 6557 | 6572 | AGTTTATGTCACTCTG | 27 | 1228 |
| 916375 | N/A | N/A | 7321 | 7336 | ACACTTTGCGAAGCAC | 27 | 1229 |
| 916395 | N/A | N/A | 7660 | 7675 | GAACTAACATACACCC | 1 | 1230 |
| 916555 | N/A | N/A | 12252 | 12267 | CCCATAATCAGGGTGG | 0 | 1231 |
| 916575 | N/A | N/A | 12758 | 12773 | GTAGAGTGGTAAGGCA | 95 | 1232 |
| 916595 | N/A | N/A | 13502 | 13517 | AAGAATCATGCAAGCT | 34 | 1233 |
| 916615 | N/A | N/A | 13997 | 14012 | TTAAACTAAGGGTCAC | 65 | 1234 |
| 916635 | N/A | N/A | 14549 | 14564 | TTAATGTGGATTCACG | 76 | 1235 |
| 916655 | N/A | N/A | 15295 | 15310 | CCAAGATAACCTCACA | 64 | 1236 |
| 916675 | N/A | N/A | 15806 | 15821 | CCATCTACATATCTGG | 26 | 1237 |
| 916695 | N/A | N/A | 16854 | 16869 | CACAATCATTTGGACC | 72 | 1238 |
| 916715 | N/A | N/A | 17739 | 17754 | GTATTAATCTGGTCAT | 87 | 1239 |
| 916735 | N/A | N/A | 19113 | 19128 | CACCTCTGGACAATCG | 29 | 1240 |
| 916755 | N/A | N/A | 20212 | 20227 | CAAACTATGCCTAGAA | 70 | 1241 |
| 916774 | N/A | N/A | 20608 | 20623 | ATTTTACGATCATCAT | 91 | 1242 |
| 916794 | N/A | N/A | 20846 | 20861 | TGCCTGTATTAGCTCA | 90 | 1243 |
| 916814 | N/A | N/A | 21345 | 21360 | CACATAAAGTCAAACG | 87 | 1244 |
| 916834 | N/A | N/A | 22124 | 22139 | AGAACAAGAGAGTACT | 3 | 1245 |
| 916854 | N/A | N/A | 23250 | 23265 | CACATAAAGGACCCCC | 54 | 1246 |
| 916874 | N/A | N/A | 24126 | 24141 | CGCTATCTGACACTCC | 87 | 1247 |
| 916894 | N/A | N/A | 24896 | 24911 | TCCACCAACGAATCCC | 50 | 1248 |

TABLE 19
Inhibition of PNPLA3 mRNA by 3-10-3 cEt gapmers targeting SEQ ID NO: 1 and 2

| | SEQ | SEQ | SEQ | SEQ | | | |
|---|---|---|---|---|---|---|---|
| | ID | ID | ID | ID | | | |
| | NO: 1 | NO: 1 | NO: 2 | NO: 2 | | PNPLA3 | SEQ |
| Compound | Start | Stop | Start | Stop | | % | ID |
| Number | Site | Site | Site | Site | Sequence (5′ to 3′) | Inhibition | NO |
| 915357 | 39 | 54 | 2777 | 2792 | TGTCTCGGCCAGGGCA | 0 | 1249 |
| 915377 | 94 | 109 | 2832 | 2847 | CCTGATCCGCAGCAGC | 0 | 1250 |
| 915397 | 182 | 197 | 2920 | 2935 | CCAGCCGCGCTCTGCG | 0 | 1251 |
| 915417 | 243 | 258 | 2981 | 2996 | GGCAGCGGGTCGCCCC | 0 | 1252 |
| 915437 | 341 | 356 | 3079 | 3094 | CGGGATACCGGAGAGG | 57 | 1253 |
| 915457 | 380 | 395 | 5954 | 5969 | CCGCACAAGATCTGAG | 71 | 1254 |
| 915477 | 407 | 422 | 5981 | 5996 | GATGCCAATGTTCCGA | 93 | 1255 |
| 915497 | 445 | 460 | 6019 | 6034 | TGTCGGAGGAACTTGC | 85 | 1256 |
| 915517 | 474 | 489 | 6048 | 6063 | CATTGGCCGGGAGGCA | 0 | 1257 |
| 915537 | 504 | 519 | 6078 | 6093 | TGCCTATTTTGCCGGA | 44 | 1258 |
| 915557 | 526 | 541 | 6100 | 6115 | TCAGACACTCTGGTAA | 26 | 1259 |
| 915617 | 732 | 747 | 11950 | 11965 | CGTACTCCCCATAGAA | 66 | 1260 |
| 915637 | 796 | 811 | 12014 | 12029 | CGTAGACTGAGCTTGG | 98 | 1261 |
| 915657 | 857 | 872 | 12075 | 12090 | CACCTTGAGATCCGGG | 0 | 1262 |
| 915677 | 903 | 918 | 13639 | 13654 | AGAACCTGAATGCATC | 78 | 1263 |
| 915697 | 979 | 994 | 16099 | 16114 | GCGACCTCAGGATCCA | 1 | 1264 |
| 915717 | 1031 | 1046 | 16151 | 16166 | GGCAGCCGACTCCGGG | 19 | 1265 |
| 915737 | 1109 | 1124 | 16229 | 16244 | CAGGATGCTCTCATCC | 0 | 1266 |
| 915757 | 1146 | 1161 | N/A | N/A | CACTCAGTGCTGTAGC | 33 | 1267 |
| 915777 | 1214 | 1229 | 19054 | 19069 | AGACATTATCCTAATG | 42 | 1268 |
| 915797 | 1263 | 1278 | 19103 | 19118 | CAATCGCAATGGCAGA | 49 | 1269 |
| 915817 | 1340 | 1355 | 23745 | 23760 | GAACACCTGTGAGGTC | 44 | 1270 |
| 915837 | 1398 | 1413 | 25161 | 25176 | GGCTGCTCACTGGCAT | 18 | 1271 |
| 915857 | 1435 | 1450 | 25198 | 25213 | GGCCAGTCCTGCTCAG | 0 | 1272 |
| 915877 | 1534 | 1549 | 25297 | 25312 | CCCAAGAAGAAGTTCA | 76 | 1273 |
| 915897 | 1576 | 1591 | 25339 | 25354 | GGAAAGGTGGAGAGCC | 24 | 1274 |
| 915917 | 1627 | 1642 | 25390 | 25405 | CTAGACTCGCCTCCTC | 77 | 1275 |
| 915937 | 1679 | 1694 | 25442 | 25457 | GCGGAGGTAGCTGCAC | 16 | 1276 |
| 915957 | 1738 | 1753 | 25501 | 25516 | CAACTCAGCTCAGAGG | 61 | 1277 |
| 915977 | 1782 | 1797 | 25545 | 25560 | ACCGCTGCACAGGCGA | 34 | 1278 |
| 915997 | 1809 | 1824 | 25572 | 25587 | TGCTGATGTATTAGAG | 83 | 1279 |
| 916017 | 1831 | 1846 | 25594 | 25609 | CCCAACCAGCTGAATT | 42 | 1280 |
| 916037 | 1878 | 1893 | 25641 | 25656 | AAACAGTCAGTAAGGG | 92 | 1281 |
| 916057 | 1901 | 1916 | 25664 | 25679 | GTCTGACCATTAATAG | 64 | 1282 |
| 916077 | 1931 | 1946 | 25694 | 25709 | CTGTCATTCTAAGAAC | 41 | 1283 |
| 916097 | 1971 | 1986 | 25734 | 25749 | AGCCTACCCCCCATCA | 0 | 1284 |
| 916117 | 1997 | 2012 | 25760 | 25775 | CCACCCCACAAGATCA | 0 | 1285 |
| 916137 | 2090 | 2105 | 25853 | 25868 | TTGCAGACCACCTGAC | 65 | 1286 |
| 916156 | 2133 | 2148 | 25896 | 25911 | ACCCCCGCCATGGAGA | 54 | 1287 |
| 916176 | 2225 | 2240 | 25988 | 26003 | ACGCTTCCTTACATTT | 84 | 1288 |
| 916196 | 2310 | 2325 | 26073 | 26088 | CTGCACCCAACCGATT | 58 | 1289 |
| 916216 | 2639 | 2654 | 26402 | 26417 | GGGCTGAGGTGAATGC | 46 | 1290 |
| 916236 | 2700 | 2715 | 26463 | 26478 | AAGTTGTGTGCTCCAG | 86 | 1291 |
| 916256 | 2751 | 2766 | 26514 | 26529 | GAAACTCACTGACCAT | 41 | 1292 |
| 916276 | N/A | N/A | 4068 | 4083 | GGAAACAACTTTCCTC | 0 | 1293 |
| 916296 | N/A | N/A | 4730 | 4745 | GATCATGTGGCGGTCT | 68 | 1294 |
| 916316 | N/A | N/A | 5364 | 5379 | CACTTACTGGCCTGGC | 30 | 1295 |
| 916336 | N/A | N/A | 5645 | 5660 | ATATTGGGCTCAATGA | 89 | 1296 |
| 916356 | N/A | N/A | 6575 | 6590 | ATCACTGGAGGTGTAC | 0 | 1297 |
| 916376 | N/A | N/A | 7328 | 7343 | CAGGATCACACTTTGC | 17 | 1298 |
| 916396 | N/A | N/A | 7661 | 7676 | GGAACTAACATACACC | 0 | 1299 |
| 916556 | N/A | N/A | 12272 | 12287 | GTATATGTTCCCAGGT | 81 | 1300 |
| 916576 | N/A | N/A | 12788 | 12803 | GTGTACATGGTCTGCA | 94 | 1301 |
| 916596 | N/A | N/A | 13529 | 13544 | ATCATTGGAAGACCGC | 89 | 1302 |
| 916616 | N/A | N/A | 13998 | 14013 | GTTAAACTAAGGGTCA | 85 | 1303 |
| 916636 | N/A | N/A | 14550 | 14565 | CTTAATGTGGATTCAC | 91 | 1304 |
| 916656 | N/A | N/A | 15351 | 15366 | TCCAACTTCAGGCTGA | 74 | 1305 |
| 916676 | N/A | N/A | 15819 | 15834 | AGCTTTGTGGGCTCCA | 69 | 1306 |
| 916696 | N/A | N/A | 16982 | 16997 | GTTTAATAAGGGCACC | 63 | 1307 |
| 916716 | N/A | N/A | 17740 | 17755 | CGTATTAATCTGGTCA | 93 | 1308 |
| 916736 | N/A | N/A | 19126 | 19141 | CACCTAAAATGCTCAC | 17 | 1309 |
| 916756 | N/A | N/A | 20213 | 20228 | ACAAACTATGCCTAGA | 58 | 1310 |
| 916775 | N/A | N/A | 20609 | 20624 | AATTTTACGATCATCA | 78 | 1311 |
| 916795 | N/A | N/A | 20927 | 20942 | GACAGATCAGCACTCG | 80 | 1312 |
| 916815 | N/A | N/A | 21407 | 21422 | CAATTCTAGACATGGC | 88 | 1313 |
| 916835 | N/A | N/A | 22338 | 22353 | TGCACCTACCCTTTTC | 39 | 1314 |
| 916855 | N/A | N/A | 23251 | 23266 | ACACATAAAGGACCCC | 48 | 1315 |
| 916875 | N/A | N/A | 24241 | 24256 | GCATTACCAGGCACCT | 61 | 1316 |
| 916895 | N/A | N/A | 24912 | 24927 | GACATCACAGGTGTTG | 5 | 1317 |

TABLE 20
Inhibition of PNPLA3 mRNA by 3-10-3 cEt gapmers targeting SEQ ID NO: 1 and 2

| | SEQ | SEQ | SEQ | SEQ | | | |
|---|---|---|---|---|---|---|---|
| | ID | ID | ID | ID | | | |
| | NO: 1 | NO: 1 | NO: 2 | NO: 2 | | PNPLA3 | SEQ |
| Compound | Start | Stop | Start | Stop | | % | ID |
| Number | Site | Site | Site | Site | Sequence (5′ to 3′) | Inhibition | NO |
| 915358 | 40 | 55 | 2778 | 2793 | GTGTCTCGGCCAGGGC | 0 | 1318 |
| 915378 | 96 | 111 | 2834 | 2849 | GTCCTGATCCGCAGCA | 0 | 1319 |
| 915398 | 184 | 199 | 2922 | 2937 | CTCCAGCCGCGCTCTG | 14 | 1320 |
| 915418 | 244 | 259 | 2982 | 2997 | AGGCAGCGGGTCGCCC | 0 | 1321 |
| 915438 | 342 | 357 | 3080 | 3095 | GCGGGATACCGGAGAG | 44 | 1322 |
| 915458 | 381 | 396 | 5955 | 5970 | TCCGCACAAGATCTGA | 41 | 1323 |
| 915478 | 408 | 423 | 5982 | 5997 | AGATGCCAATGTTCCG | 95 | 1324 |
| 915498 | 446 | 461 | 6020 | 6035 | CTGTCGGAGGAACTTG | 40 | 1325 |
| 915518 | 475 | 490 | 6049 | 6064 | ACATTGGCCGGGAGGC | 5 | 1326 |
| 915538 | 505 | 520 | 6079 | 6094 | ATGCCTATTTTGCCGG | 61 | 1327 |
| 915558 | 527 | 542 | 6101 | 6116 | ATCAGACACTCTGGTA | 0 | 1328 |
| 915618 | 748 | 763 | 11966 | 11981 | ACTTTAGGGCAGATGT | 87 | 1329 |
| 915638 | 818 | 833 | 12036 | 12051 | GTAGAGGTTCCCTGTG | 87 | 1330 |
| 915658 | 859 | 874 | N/A | N/A | AGCACCTTGAGATCCG | 0 | 1331 |
| 915678 | 926 | 941 | N/A | N/A | GTTGCAGATGCCCTTC | 24 | 1332 |
| 915698 | 980 | 995 | 16100 | 16115 | GGCGACCTCAGGATCC | 0 | 1333 |
| 915718 | 1032 | 1047 | 16152 | 16167 | AGGCAGCCGACTCCGG | 8 | 1334 |
| 915738 | 1114 | 1129 | 16234 | 16249 | GTGTCCAGGATGCTCT | 41 | 1335 |
| 915758 | 1147 | 1162 | N/A | N/A | TCACTCAGTGCTGTAG | 59 | 1336 |
| 915778 | 1217 | 1232 | 19057 | 19072 | ATAAGACATTATCCTA | 85 | 1337 |
| 915798 | 1264 | 1279 | 19104 | 19119 | ACAATCGCAATGGCAG | 66 | 1338 |
| 915818 | 1342 | 1357 | 23747 | 23762 | GTGAACACCTGTGAGG | 58 | 1339 |
| 915838 | 1400 | 1415 | 25163 | 25178 | TTGGCTGCTCACTGGC | 79 | 1340 |
| 915858 | 1436 | 1451 | 25199 | 25214 | GGGCCAGTCCTGCTCA | 0 | 1341 |
| 915878 | 1535 | 1550 | 25298 | 25313 | GCCCAAGAAGAAGTTC | 54 | 1342 |
| 915898 | 1590 | 1605 | 25353 | 25368 | CTAGTGAAAAACTGGG | 34 | 1343 |
| 915918 | 1628 | 1643 | 25391 | 25406 | GCTAGACTCGCCTCCT | 33 | 1344 |
| 915938 | 1680 | 1695 | 25443 | 25458 | TGCGGAGGTAGCTGCA | 0 | 1345 |
| 915958 | 1756 | 1771 | 25519 | 25534 | CCTAGCTTTTCATAAA | 0 | 1346 |
| 915978 | 1783 | 1798 | 25546 | 25561 | GACCGCTGCACAGGCG | 24 | 1347 |
| 915998 | 1810 | 1825 | 25573 | 25588 | ATGCTGATGTATTAGA | 86 | 1348 |
| 916018 | 1832 | 1847 | 25595 | 25610 | TCCCAACCAGCTGAAT | 3 | 1349 |
| 916038 | 1879 | 1894 | 25642 | 25657 | GAAACAGTCAGTAAGG | 64 | 1350 |
| 916058 | 1902 | 1917 | 25665 | 25680 | AGTCTGACCATTAATA | 86 | 1351 |
| 916078 | 1933 | 1948 | 25696 | 25711 | ACCTGTCATTCTAAGA | 18 | 1352 |
| 916098 | 1972 | 1987 | 25735 | 25750 | CAGCCTACCCCCCATC | 41 | 1353 |
| 916118 | 1999 | 2014 | 25762 | 25777 | CTCCACCCCACAAGAT | 0 | 1354 |
| 916138 | 2092 | 2107 | 25855 | 25870 | CTTTGCAGACCACCTG | 65 | 1355 |
| 916157 | 2134 | 2149 | 25897 | 25912 | TACCCCCGCCATGGAG | 57 | 1356 |
| 916177 | 2237 | 2252 | 26000 | 26015 | CAACAGGTAACAACGC | 88 | 1357 |
| 916197 | 2579 | 2594 | 26342 | 26357 | GTCAGACTTTCACTCA | 81 | 1358 |
| 916217 | 2659 | 2674 | 26422 | 26437 | GTGCTTGGCTCCTGCC | 43 | 1359 |
| 916237 | 2701 | 2716 | 26464 | 26479 | CAAGTTGTGTGCTCCA | 73 | 1360 |
| 916257 | 2769 | 2784 | 26532 | 26547 | CATCGCCACACATGGG | 61 | 1361 |
| 916277 | N/A | N/A | 4105 | 4120 | AGGAAGGGTCCCAAAC | 0 | 1362 |
| 916297 | N/A | N/A | 4731 | 4746 | TGATCATGTGGCGGTC | 80 | 1363 |
| 916317 | N/A | N/A | 5391 | 5406 | TGCTATCAGGTGCAGG | 60 | 1364 |
| 916337 | N/A | N/A | 5646 | 5661 | TATATTGGGCTCAATG | 71 | 1365 |
| 916357 | N/A | N/A | 6594 | 6609 | GTTTACAAACATGGAC | 26 | 1366 |
| 916377 | N/A | N/A | 7464 | 7479 | TCATTAGCATCACCGG | 33 | 1367 |
| 916397 | N/A | N/A | 7662 | 7677 | GGGAACTAACATACAC | 0 | 1368 |
| 916557 | N/A | N/A | 12274 | 12289 | GGGTATATGTTCCCAG | 0 | 1369 |
| 916577 | N/A | N/A | 12830 | 12845 | TGCATAGCCTTCTTTC | 84 | 1370 |
| 916597 | N/A | N/A | 13530 | 13545 | CATCATTGGAAGACCG | 62 | 1371 |
| 916617 | N/A | N/A | 14016 | 14031 | TCTTTAACTTCGGCCC | 70 | 1372 |
| 916637 | N/A | N/A | 14551 | 14566 | TCTTAATGTGGATTCA | 88 | 1373 |
| 916657 | N/A | N/A | 15388 | 15403 | TCAGACAACCACAGCT | 66 | 1374 |
| 916677 | N/A | N/A | 15852 | 15867 | TAAAGCAGGACACACG | 74 | 1375 |
| 916697 | N/A | N/A | 17077 | 17092 | AGACATGTTGGTGTCT | 0 | 1376 |
| 916717 | N/A | N/A | 17788 | 17803 | CCCCAGTCTTTTATTC | 0 | 1377 |
| 916737 | N/A | N/A | 19140 | 19155 | GGAAGACACGGAGCCA | 20 | 1378 |
| 916757 | N/A | N/A | 20240 | 20255 | CCTAACTGCTGGCTCT | 85 | 1379 |
| 916776 | N/A | N/A | 20610 | 20625 | TAATTTTACGATCATC | 76 | 1380 |
| 916796 | N/A | N/A | 20939 | 20954 | CTCTTTGTAGCAGACA | 90 | 1381 |
| 916816 | N/A | N/A | 21439 | 21454 | CAATATACTGAGAGGA | 92 | 1382 |
| 916836 | N/A | N/A | 22392 | 22407 | GTAGACATCCTTCCCG | 65 | 1383 |
| 916856 | N/A | N/A | 23252 | 23267 | GACACATAAAGGACCC | 59 | 1384 |
| 916876 | N/A | N/A | 24242 | 24257 | TGCATTACCAGGCACC | 37 | 1385 |
| 916896 | N/A | N/A | 24913 | 24928 | GGACATCACAGGTGTT | 19 | 1386 |

TABLE 21
Inhibition of PNPLA3 mRNA by 3-10-3 cEt gapmers targeting SEQ ID NO: 1 and 2

| | SEQ | SEQ | SEQ | SEQ | | | |
|---|---|---|---|---|---|---|---|
| | ID | ID | ID | ID | | | |
| | NO: 1 | NO: 1 | NO: 2 | NO: 2 | | PNPLA3 | SEQ |
| Compound | Start | Stop | Start | Stop | | % | ID |
| Number | Site | Site | Site | Site | Sequence (5′ to 3′) | Inhibition | NO |
| 915359 | 41 | 56 | 2779 | 2794 | AGTGTCTCGGCCAGGG | 0 | 1387 |
| 915379 | 97 | 112 | 2835 | 2850 | GGTCCTGATCCGCAGC | 0 | 1388 |
| 915399 | 185 | 200 | 2923 | 2938 | GCTCCAGCCGCGCTCT | 26 | 1389 |
| 915419 | 245 | 260 | 2983 | 2998 | CAGGCAGCGGGTCGCC | 0 | 1390 |
| 915439 | 343 | 358 | 3081 | 3096 | AGCGGGATACCGGAGA | 69 | 1391 |
| 915459 | 382 | 397 | 5956 | 5971 | TTCCGCACAAGATCTG | 71 | 1392 |
| 915479 | 409 | 424 | 5983 | 5998 | AAGATGCCAATGTTCC | 93 | 1393 |
| 915499 | 448 | 463 | 6022 | 6037 | CCCTGTCGGAGGAACT | 30 | 1394 |
| 915519 | 477 | 492 | 6051 | 6066 | GGACATTGGCCGGGAG | 88 | 1395 |
| 915539 | 506 | 521 | 6080 | 6095 | GATGCCTATTTTGCCG | 60 | 1396 |
| 915559 | 529 | 544 | 6103 | 6118 | CCATCAGACACTCTGG | 30 | 1397 |
| 915579 | 595 | 610 | 7825 | 7840 | CAGGAACATACCAAGG | 98 | 1398 |
| 915599 | 674 | 689 | 11892 | 11907 | GTTGTCACTCACTCCT | 98 | 1399 |
| 915619 | 749 | 764 | 11967 | 11982 | GACTTTAGGGCAGATG | 96 | 1400 |
| 915639 | 819 | 834 | 12037 | 12052 | GGTAGAGGTTCCCTGT | 92 | 1401 |
| 915659 | 860 | 875 | N/A | N/A | CAGCACCTTGAGATCC | 0 | 1402 |
| 915679 | 928 | 943 | N/A | N/A | CTGTTGCAGATGCCCT | 58 | 1403 |
| 915699 | 981 | 996 | 16101 | 16116 | TGGCGACCTCAGGATC | 40 | 1404 |
| 915719 | 1033 | 1048 | 16153 | 16168 | AAGGCAGCCGACTCCG | 0 | 1405 |
| 915739 | 1115 | 1130 | 16235 | 16250 | GGTGTCCAGGATGCTC | 40 | 1406 |
| 915759 | 1148 | 1163 | N/A | N/A | TTCACTCAGTGCTGTA | 29 | 1407 |
| 915779 | 1219 | 1234 | 19059 | 19074 | ACATAAGACATTATCC | 86 | 1408 |
| 915799 | 1268 | 1283 | 19108 | 19123 | CTGGACAATCGCAATG | 42 | 1409 |
| 915819 | 1344 | 1359 | 23749 | 23764 | GAGTGAACACCTGTGA | 81 | 1410 |
| 915839 | 1401 | 1416 | 25164 | 25179 | GTTGGCTGCTCACTGG | 85 | 1411 |
| 915859 | 1437 | 1452 | 25200 | 25215 | AGGGCCAGTCCTGCTC | 0 | 1412 |
| 915879 | 1538 | 1553 | 25301 | 25316 | ATTGCCCAAGAAGAAG | 54 | 1413 |
| 915899 | 1591 | 1606 | 25354 | 25369 | TCTAGTGAAAAACTGG | 0 | 1414 |
| 915919 | 1629 | 1644 | 25392 | 25407 | TGCTAGACTCGCCTCC | 72 | 1415 |
| 915939 | 1681 | 1696 | 25444 | 25459 | ATGCGGAGGTAGCTGC | 39 | 1416 |
| 915959 | 1764 | 1779 | 25527 | 25542 | GGTTGCTTCCTAGCTT | 87 | 1417 |
| 915979 | 1784 | 1799 | 25547 | 25562 | GGACCGCTGCACAGGC | 0 | 1418 |
| 915999 | 1811 | 1826 | 25574 | 25589 | CATGCTGATGTATTAG | 35 | 1419 |
| 916019 | 1833 | 1848 | 25596 | 25611 | TTCCCAACCAGCTGAA | 0 | 1420 |
| 916039 | 1880 | 1895 | 25643 | 25658 | CGAAACAGTCAGTAAG | 80 | 1421 |
| 916059 | 1905 | 1920 | 25668 | 25683 | AACAGTCTGACCATTA | 85 | 1422 |
| 916079 | 1934 | 1949 | 25697 | 25712 | CACCTGTCATTCTAAG | 45 | 1423 |
| 916099 | 1973 | 1988 | 25736 | 25751 | CCAGCCTACCCCCCAT | 53 | 1424 |
| 916119 | 2022 | 2037 | 25785 | 25800 | GTGGGATCATGCTATT | 76 | 1425 |
| 916139 | 2093 | 2108 | 25856 | 25871 | TCTTTGCAGACCACCT | 85 | 1426 |
| 916158 | 2135 | 2150 | 25898 | 25913 | TTACCCCCGCCATGGA | 0 | 1427 |
| 916178 | 2238 | 2253 | 26001 | 26016 | TCAACAGGTAACAACG | 87 | 1428 |
| 916198 | 2620 | 2635 | 26383 | 26398 | GCACACTAGATTATTT | 66 | 1429 |
| 916218 | 2673 | 2688 | 26436 | 26451 | CGGAAGCTCCTGCTGT | 27 | 1430 |
| 916238 | 2702 | 2717 | 26465 | 26480 | TCAAGTTGTGTGCTCC | 91 | 1431 |
| 916258 | 2770 | 2785 | 26533 | 26548 | TCATCGCCACACATGG | 49 | 1432 |
| 916278 | N/A | N/A | 4211 | 4226 | TCATTTCCAGGAGTAC | 75 | 1433 |
| 916298 | N/A | N/A | 4735 | 4750 | CAAATGATCATGTGGC | 93 | 1434 |
| 916318 | N/A | N/A | 5394 | 5409 | TAATGCTATCAGGTGC | 95 | 1435 |
| 916338 | N/A | N/A | 5648 | 5663 | GATATATTGGGCTCAA | 97 | 1436 |
| 916358 | N/A | N/A | 6596 | 6611 | GGGTTTACAAACATGG | 75 | 1437 |
| 916378 | N/A | N/A | 7465 | 7480 | TTCATTAGCATCACCG | 78 | 1438 |
| 916398 | N/A | N/A | 7686 | 7701 | GTTAATCCATGGGTCA | 49 | 1439 |
| 916418 | N/A | N/A | 8992 | 9007 | AGCCTAAACTTCCTCC | 63 | 1440 |
| 916438 | N/A | N/A | 9318 | 9333 | AGAAGAGCCGCCCTGC | 77 | 1441 |
| 916458 | N/A | N/A | 9795 | 9810 | GCAAGACTAGCAAGTG | 85 | 1442 |
| 916478 | N/A | N/A | 10301 | 10316 | AGCATGCGGTATGTAC | 67 | 1443 |
| 916498 | N/A | N/A | 10849 | 10864 | CACACAATTTCTAGGG | 82 | 1444 |
| 916518 | N/A | N/A | 11346 | 11361 | TTGACAATTAGAACCA | 96 | 1445 |
| 916538 | N/A | N/A | 11711 | 11726 | ACAAATCCTTACCGAG | 54 | 1446 |
| 916558 | N/A | N/A | 12285 | 12300 | GTTTTAGGTCTGGGTA | 94 | 1447 |
| 916578 | N/A | N/A | 12831 | 12846 | TTGCATAGCCTTCTTT | 93 | 1448 |
| 916598 | N/A | N/A | 13660 | 13675 | CATACATACCCTTCTC | 9 | 1449 |
| 916618 | N/A | N/A | 14025 | 14040 | CGCAGAAACTCTTTAA | 89 | 1450 |
| 916638 | N/A | N/A | 14552 | 14567 | GTCTTAATGTGGATTC | 93 | 1451 |
| 916658 | N/A | N/A | 15421 | 15436 | AGCATTGGCACACTGG | 70 | 1452 |
| 916678 | N/A | N/A | 15857 | 15872 | GGCTTTAAAGCAGGAC | 62 | 1453 |
| 916698 | N/A | N/A | 17079 | 17094 | GCAGACATGTTGGTGT | 2 | 1454 |
| 916718 | N/A | N/A | 17839 | 17854 | TACAAGCTGGTCCTTG | 0 | 1455 |
| 916738 | N/A | N/A | 19211 | 19226 | GACAATCCAGGTCCCA | 70 | 1456 |
| 916758 | N/A | N/A | 20285 | 20300 | GAGGAAGCCCAATCAA | 81 | 1457 |
| 916777 | N/A | N/A | 20611 | 20626 | CTAATTTTACGATCAT | 81 | 1458 |
| 916797 | N/A | N/A | 20984 | 20999 | TTAAACTGCCAAGTCC | 83 | 1459 |
| 916817 | N/A | N/A | 21440 | 21455 | CCAATATACTGAGAGG | 96 | 1460 |
| 916837 | N/A | N/A | 22406 | 22421 | GGTAGCACCGCCAAGT | 0 | 1461 |
| 916857 | N/A | N/A | 23301 | 23316 | CACCATGGAGAGGTCT | 0 | 1462 |
| 916877 | N/A | N/A | 24243 | 24258 | TTGCATTACCAGGCAC | 17 | 1463 |
| 916897 | N/A | N/A | 24934 | 24949 | GCTACCTGGACACCTC | 47 | 1464 |

TABLE 22
Inhibition of PNPLA3 mRNA by 3-10-3 cEt gapmers targeting SEQ ID NO: 1 and 2

| | SEQ | SEQ | SEQ | SEQ | | | |
|---|---|---|---|---|---|---|---|
| | ID | ID | ID | ID | | | |
| | NO: 1 | NO: 1 | NO: 2 | NO: 2 | | PNPLA3 | SEQ |
| Compound | Start | Stop | Start | Stop | | % | ID |
| Number | Site | Site | Site | Site | Sequence (5′ to 3′) | Inhibition | NO |
| 841947 | 2094 | 2109 | 25857 | 25872 | ATCTTTGCAGACCACC | 89 | 1464 |
| 912986 | N/A | N/A | 20288 | 20303 | TCAGAGGAAGCCCAAT | 92 | 254 |
| | | | 20318 | 20333 | | | |
| 915360 | 42 | 57 | 2780 | 2795 | CAGTGTCTCGGCCAGG | 0 | 1466 |
| 915380 | 98 | 113 | 2836 | 2851 | GGGTCCTGATCCGCAG | 0 | 1467 |
| 915400 | 186 | 201 | 2924 | 2939 | AGCTCCAGCCGCGCTC | 0 | 1468 |
| 915420 | 246 | 261 | 2984 | 2999 | TCAGGCAGCGGGTCGC | 78 | 1469 |
| 915440 | 344 | 359 | 3082 | 3097 | CAGCGGGATACCGGAG | 72 | 1470 |
| 915460 | 383 | 398 | 5957 | 5972 | CTTCCGCACAAGATCT | 0 | 1471 |
| 915480 | 411 | 426 | 5985 | 6000 | GGAAGATGCCAATGTT | 94 | 1472 |
| 915500 | 449 | 464 | 6023 | 6038 | ACCCTGTCGGAGGAAC | 40 | 1473 |
| 915520 | 480 | 495 | 6054 | 6069 | GGTGGACATTGGCCGG | 38 | 1474 |
| 915540 | 507 | 522 | 6081 | 6096 | AGATGCCTATTTTGCC | 76 | 1475 |
| 915560 | 556 | 571 | 6130 | 6145 | CGAAAGTCAGACACCA | 69 | 1476 |
| 915620 | 750 | 765 | 11968 | 11983 | TGACTTTAGGGCAGAT | 89 | 1477 |
| 915640 | 821 | 836 | 12039 | 12054 | AAGGTAGAGGTTCCCT | 10 | 1478 |
| 915660 | 875 | 890 | 13611 | 13626 | AAGGCATATCTCTCCC | 47 | 1479 |
| 915680 | 929 | 944 | N/A | N/A | CCTGTTGCAGATGCCC | 22 | 1480 |
| 915700 | 982 | 997 | 16102 | 16117 | ATGGCGACCTCAGGAT | 58 | 1481 |
| 915720 | 1034 | 1049 | 16154 | 16169 | CAAGGCAGCCGACTCC | 63 | 1482 |
| 915740 | 1121 | 1136 | 16241 | 16256 | CGAGAGGGTGTCCAGG | 0 | 1483 |
| 915760 | 1149 | 1164 | N/A | N/A | CTTCACTCAGTGCTGT | 13 | 1484 |
| 915780 | 1226 | 1241 | 19066 | 19081 | CAGCATTACATAAGAC | 94 | 1485 |
| 915800 | 1270 | 1285 | 19110 | 19125 | CTCTGGACAATCGCAA | 55 | 1486 |
| 915820 | 1345 | 1360 | 23750 | 23765 | CGAGTGAACACCTGTG | 83 | 1487 |
| 915840 | 1402 | 1417 | 25165 | 25180 | TGTTGGCTGCTCACTG | 77 | 1488 |
| 915860 | 1470 | 1485 | 25233 | 25248 | CTGGACAGCCCTTGGG | 29 | 1489 |
| 915880 | 1539 | 1554 | 25302 | 25317 | TATTGCCCAAGAAGAA | 18 | 1490 |
| 915900 | 1598 | 1613 | 25361 | 25376 | ACTCTTCTCTAGTGAA | 67 | 1491 |
| 915920 | 1630 | 1645 | 25393 | 25408 | CTGCTAGACTCGCCTC | 88 | 1492 |
| 915940 | 1682 | 1697 | 25445 | 25460 | AATGCGGAGGTAGCTG | 0 | 1493 |
| 915960 | 1765 | 1780 | 25528 | 25543 | AGGTTGCTTCCTAGCT | 55 | 1494 |
| 915980 | 1785 | 1800 | 25548 | 25563 | TGGACCGCTGCACAGG | 82 | 1495 |
| 916000 | 1812 | 1827 | 25575 | 25590 | GCATGCTGATGTATTA | 52 | 1496 |
| 916020 | 1837 | 1852 | 25600 | 25615 | TCATTTCCCAACCAGC | 94 | 1497 |
| 916040 | 1881 | 1896 | 25644 | 25659 | ACGAAACAGTCAGTAA | 79 | 1498 |
| 916060 | 1907 | 1922 | 25670 | 25685 | GGAACAGTCTGACCAT | 22 | 1499 |
| 916080 | 1936 | 1951 | 25699 | 25714 | AACACCTGTCATTCTA | 71 | 1500 |
| 916100 | 1974 | 1989 | 25737 | 25752 | GCCAGCCTACCCCCCA | 23 | 1501 |
| 916120 | 2023 | 2038 | 25786 | 25801 | AGTGGGATCATGCTAT | 0 | 1502 |
| 916159 | 2136 | 2151 | 25899 | 25914 | GTTACCCCCGCCATGG | 47 | 1503 |
| 916179 | 2239 | 2254 | 26002 | 26017 | TTCAACAGGTAACAAC | 84 | 1504 |
| 916199 | 2621 | 2636 | 26384 | 26399 | TGCACACTAGATTATT | 0 | 1505 |
| 916219 | 2674 | 2689 | 26437 | 26452 | GCGGAAGCTCCTGCTG | 6 | 1506 |
| 916239 | 2704 | 2719 | 26467 | 26482 | GTTCAAGTTGTGTGCT | 85 | 1507 |
| 916259 | 2771 | 2786 | 26534 | 26549 | CTCATCGCCACACATG | 85 | 1508 |
| 916279 | N/A | N/A | 4218 | 4233 | CGGAATCTCATTTCCA | 0 | 1509 |
| 916299 | N/A | N/A | 4736 | 4751 | GCAAATGATCATGTGG | 93 | 1510 |
| 916319 | N/A | N/A | 5396 | 5411 | CTTAATGCTATCAGGT | 83 | 1511 |
| 916339 | N/A | N/A | 5649 | 5664 | GGATATATTGGGCTCA | 96 | 1512 |
| 916359 | N/A | N/A | 6597 | 6612 | AGGGTTTACAAACATG | 32 | 1513 |
| 916379 | N/A | N/A | 7466 | 7481 | ATTCATTAGCATCACC | 52 | 1514 |
| 916399 | N/A | N/A | 7687 | 7702 | GGTTAATCCATGGGTC | 0 | 1515 |
| 916559 | N/A | N/A | 12286 | 12301 | AGTTTTAGGTCTGGGT | 89 | 1516 |
| 916579 | N/A | N/A | 12833 | 12848 | CATTGCATAGCCTTCT | 96 | 1517 |
| 916599 | N/A | N/A | 13661 | 13676 | CCATACATACCCTTCT | 21 | 1518 |
| 916619 | N/A | N/A | 14077 | 14092 | ACCCACACCTGACTGG | 16 | 1519 |
| 916639 | N/A | N/A | 14572 | 14587 | CGCTCCTACTTATCCC | 96 | 1520 |
| 916659 | N/A | N/A | 15427 | 15442 | TCTTACAGCATTGGCA | 38 | 1521 |
| 916679 | N/A | N/A | 15973 | 15988 | CATCTACCAAACTGCA | 73 | 1522 |
| 916699 | N/A | N/A | 17135 | 17150 | AACAAACATCGATTTT | 47 | 1523 |
| 916719 | N/A | N/A | 17844 | 17859 | AGCTTTACAAGCTGGT | 0 | 1524 |
| 916739 | N/A | N/A | 19213 | 19228 | ACGACAATCCAGGTCC | 14 | 1525 |
| 916778 | N/A | N/A | 20612 | 20627 | TCTAATTTTACGATCA | 92 | 1526 |
| 916798 | N/A | N/A | 20985 | 21000 | ATTAAACTGCCAAGTC | 72 | 1527 |
| 916818 | N/A | N/A | 21441 | 21456 | ACCAATATACTGAGAG | 92 | 1528 |
| 916838 | N/A | N/A | 22409 | 22424 | AGCGGTAGCACCGCCA | 0 | 1529 |
| 916858 | N/A | N/A | 23323 | 23338 | TCACATGTGAGCCCAG | 46 | 1530 |
| 916878 | N/A | N/A | 24271 | 24286 | GTACAACAGAGGGTGG | 19 | 1531 |
| 916898 | N/A | N/A | 24978 | 24993 | GGCTGATGTCACCACC | 32 | 1532 |

TABLE 23
Inhibition of PNPLA3 mRNA by 3-10-3 cEt gapmers targeting SEQ ID NO: 1 and 2

| | SEQ | SEQ | SEQ | SEQ | | | |
|---|---|---|---|---|---|---|---|
| | ID | ID | ID | ID | | | |
| | NO: 1 | NO: 1 | NO: 2 | NO: 2 | | PNPLA3 | SEQ |
| Compound | Start | Stop | Start | Stop | | % | ID |
| Number | Site | Site | Site | Site | Sequence (5′ to 3′) | Inhibition | NO |
| 915361 | 43 | 58 | 2781 | 2796 | TCAGTGTCTCGGCCAG | 0 | 1533 |
| 915381 | 105 | 120 | 2843 | 2858 | TCGGCTCGGGTCCTGA | 0 | 1534 |
| 915401 | 188 | 203 | 2926 | 2941 | CAAGCTCCAGCCGCGC | 22 | 1535 |
| 915421 | 247 | 262 | 2985 | 3000 | CTCAGGCAGCGGGTCG | 48 | 1536 |
| 915441 | 345 | 360 | 3083 | 3098 | CCAGCGGGATACCGGA | 0 | 1537 |
| 915461 | 384 | 399 | 5958 | 5973 | CCTTCCGCACAAGATC | 59 | 1538 |
| 915481 | 414 | 429 | 5988 | 6003 | GATGGAAGATGCCAAT | 83 | 1539 |
| 915501 | 450 | 465 | 6024 | 6039 | GACCCTGTCGGAGGAA | 26 | 1540 |
| 915521 | 482 | 497 | 6056 | 6071 | CTGGTGGACATTGGCC | 0 | 1541 |
| 915541 | 508 | 523 | 6082 | 6097 | GAGATGCCTATTTTGC | 92 | 1542 |
| 915561 | 557 | 572 | 6131 | 6146 | CCGAAAGTCAGACACC | 0 | 1543 |
| 915601 | 691 | 706 | 11909 | 11924 | GCATCAATGAAGGGTA | 91 | 1544 |
| 915621 | 751 | 766 | 11969 | 11984 | TTGACTTTAGGGCAGA | 85 | 1545 |
| 915641 | 822 | 837 | 12040 | 12055 | GAAGGTAGAGGTTCCC | 74 | 1546 |
| 915661 | 876 | 891 | 13612 | 13627 | GAAGGCATATCTCTCC | 32 | 1547 |
| 915681 | 930 | 945 | 16050 | 16065 | GCCTGTTGCAGATGCC | 0 | 1548 |
| 915701 | 983 | 998 | 16103 | 16118 | CATGGCGACCTCAGGA | 0 | 1549 |
| 915721 | 1035 | 1050 | 16155 | 16170 | CCAAGGCAGCCGACTC | 79 | 1550 |
| 915741 | 1122 | 1137 | 16242 | 16257 | GCGAGAGGGTGTCCAG | 0 | 1551 |
| 915761 | 1150 | 1165 | 18990 | 19005 | TCTTCACTCAGTGCTG | 41 | 1552 |
| 915781 | 1227 | 1242 | 19067 | 19082 | GCAGCATTACATAAGA | 75 | 1553 |
| 915801 | 1273 | 1288 | N/A | N/A | AGTCTCTGGACAATCG | 0 | 1554 |
| 915821 | 1346 | 1361 | 23751 | 23766 | TCGAGTGAACACCTGT | 52 | 1555 |
| 915841 | 1403 | 1418 | 25166 | 25181 | CTGTTGGCTGCTCACT | 80 | 1556 |
| 915861 | 1471 | 1486 | 25234 | 25249 | GCTGGACAGCCCTTGG | 0 | 1557 |
| 915881 | 1540 | 1555 | 25303 | 25318 | TTATTGCCCAAGAAGA | 75 | 1558 |
| 915901 | 1599 | 1614 | 25362 | 25377 | GACTCTTCTCTAGTGA | 67 | 1559 |
| 915921 | 1631 | 1646 | 25394 | 25409 | TCTGCTAGACTCGCCT | 50 | 1560 |
| 915941 | 1683 | 1698 | 25446 | 25461 | CAATGCGGAGGTAGCT | 39 | 1561 |
| 915961 | 1766 | 1781 | 25529 | 25544 | AAGGTTGCTTCCTAGC | 71 | 1562 |
| 915981 | 1786 | 1801 | 25549 | 25564 | CTGGACCGCTGCACAG | 0 | 1563 |
| 916001 | 1813 | 1828 | 25576 | 25591 | CGCATGCTGATGTATT | 73 | 1564 |
| 916021 | 1840 | 1855 | 25603 | 25618 | GTGTCATTTCCCAACC | 61 | 1565 |
| 916041 | 1882 | 1897 | 25645 | 25660 | CACGAAACAGTCAGTA | 34 | 1566 |
| 916061 | 1910 | 1925 | 25673 | 25688 | GCTGGAACAGTCTGAC | 82 | 1567 |
| 916081 | 1942 | 1957 | 25705 | 25720 | CATCCAAACACCTGTC | 69 | 1568 |
| 916101 | 1975 | 1990 | 25738 | 25753 | GGCCAGCCTACCCCCC | 2 | 1569 |
| 916121 | 2024 | 2039 | 25787 | 25802 | AAGTGGGATCATGCTA | 26 | 1570 |
| 916140 | 2095 | 2110 | 25858 | 25873 | CATCTTTGCAGACCAC | 92 | 1571 |
| 916160 | 2137 | 2152 | 25900 | 25915 | TGTTACCCCCGCCATG | 51 | 1572 |
| 916180 | 2257 | 2272 | 26020 | 26035 | GATTCACATAATACAA | 87 | 1573 |
| 916200 | 2622 | 2637 | 26385 | 26400 | CTGCACACTAGATTAT | 0 | 1574 |
| 916220 | 2675 | 2690 | 26438 | 26453 | GGCGGAAGCTCCTGCT | 0 | 1575 |
| 916240 | 2705 | 2720 | 26468 | 26483 | GGTTCAAGTTGTGTGC | 69 | 1576 |
| 916260 | 2772 | 2787 | 26535 | 26550 | TCTCATCGCCACACAT | 72 | 1577 |
| 916280 | N/A | N/A | 4220 | 4235 | TACGGAATCTCATTTC | 80 | 1578 |
| 916300 | N/A | N/A | 4791 | 4806 | GGCCACCTTGGGATAC | 17 | 1579 |
| 916320 | N/A | N/A | 5398 | 5413 | GCCTTAATGCTATCAG | 67 | 1580 |
| 916340 | N/A | N/A | 5650 | 5665 | TGGATATATTGGGCTC | 97 | 1581 |
| 916360 | N/A | N/A | 6603 | 6618 | ACATTCAGGGTTTACA | 18 | 1582 |
| 916380 | N/A | N/A | 7468 | 7483 | GTATTCATTAGCATCA | 51 | 1583 |
| 916400 | N/A | N/A | 7688 | 7703 | AGGTTAATCCATGGGT | 29 | 1584 |
| 916560 | N/A | N/A | 12287 | 12302 | GAGTTTTAGGTCTGGG | 95 | 1585 |
| 916580 | N/A | N/A | 12905 | 12920 | CTTATAAAGCACACGG | 95 | 1586 |
| 916600 | N/A | N/A | 13683 | 13698 | GGGCATGGCTGATCCT | 8 | 1587 |
| 916620 | N/A | N/A | 14099 | 14114 | CAAACTTGTCTAGTGG | 67 | 1588 |
| 916640 | N/A | N/A | 14600 | 14615 | TCGCATCCATGGGTCC | 83 | 1589 |
| 916660 | N/A | N/A | 15429 | 15444 | GCTCTTACAGCATTGG | 51 | 1590 |
| 916680 | N/A | N/A | 15974 | 15989 | CCATCTACCAAACTGC | 61 | 1591 |
| 916700 | N/A | N/A | 17195 | 17210 | GACTTAGTCCGTGTTC | 49 | 1592 |
| 916720 | N/A | N/A | 17883 | 17898 | CAGCATCTATGTTCTC | 67 | 1593 |
| 916740 | N/A | N/A | 19239 | 19254 | ATAGACTGTGAGCTGT | 82 | 1594 |
| 916759 | N/A | N/A | 20354 | 20369 | GACCATTCTGCTCCCC | 20 | 1595 |
| 916779 | N/A | N/A | 20632 | 20647 | GCCCATACCTTTTATC | 47 | 1596 |
| 916799 | N/A | N/A | 20987 | 21002 | GTATTAAACTGCCAAG | 81 | 1597 |
| 916819 | N/A | N/A | 21444 | 21459 | CTAACCAATATACTGA | 73 | 1598 |
| 916839 | N/A | N/A | 22506 | 22521 | GGCTGGTGATGAAACA | 0 | 1599 |
| 916859 | N/A | N/A | 23345 | 23360 | CCTCATGGTTTGCTGT | 31 | 1600 |
| 916879 | N/A | N/A | 24273 | 24288 | CAGTACAACAGAGGGT | 81 | 1601 |
| 916899 | N/A | N/A | 25064 | 25079 | CACATTGCCGGCCAGT | 58 | 1602 |

TABLE 24
Inhibition of PNPLA3 mRNA by 3-10-3 cEt gapmers targeting SEQ ID NO: 1 and 2

| | SEQ | SEQ | SEQ | SEQ | | | |
|---|---|---|---|---|---|---|---|
| | ID | ID | ID | ID | | | |
| | NO: 1 | NO: 1 | NO: 2 | NO: 2 | | PNPLA3 | SEQ |
| Compound | Start | Stop | Start | Stop | | % | ID |
| Number | Site | Site | Site | Site | Sequence (5′ to 3′) | Inhibition | NO |
| 915362 | 44 | 59 | 2782 | 2797 | CTCAGTGTCTCGGCCA | 0 | 1603 |
| 915382 | 106 | 121 | 2844 | 2859 | ATCGGCTCGGGTCCTG | 30 | 1604 |
| 915402 | 189 | 204 | 2927 | 2942 | ACAAGCTCCAGCCGCG | 24 | 1605 |
| 915422 | 248 | 263 | 2986 | 3001 | GCTCAGGCAGCGGGTC | 33 | 1606 |
| 915442 | 346 | 361 | N/A | N/A | TCCAGCGGGATACCGG | 0 | 1607 |
| 915462 | 385 | 400 | 5959 | 5974 | GCCTTCCGCACAAGAT | 60 | 1608 |
| 915482 | 415 | 430 | 5989 | 6004 | GGATGGAAGATGCCAA | 60 | 1609 |
| 915502 | 451 | 466 | 6025 | 6040 | AGACCCTGTCGGAGGA | 75 | 1610 |
| 915522 | 487 | 502 | 6061 | 6076 | ATGAGCTGGTGGACAT | 74 | 1611 |
| 915542 | 509 | 524 | 6083 | 6098 | AGAGATGCCTATTTTG | 91 | 1612 |
| 915562 | 558 | 573 | 6132 | 6147 | ACCGAAAGTCAGACAC | 0 | 1613 |
| 915602 | 692 | 707 | 11910 | 11925 | GGCATCAATGAAGGGT | 88 | 1614 |
| 915622 | 752 | 767 | 11970 | 11985 | CTTGACTTTAGGGCAG | 86 | 1615 |
| 915642 | 824 | 839 | 12042 | 12057 | GAGAAGGTAGAGGTTC | 81 | 1616 |
| 915662 | 878 | 893 | 13614 | 13629 | TCGAAGGCATATCTCT | 16 | 1617 |
| 915682 | 931 | 946 | 16051 | 16066 | GGCCTGTTGCAGATGC | 0 | 1618 |
| 915702 | 984 | 999 | 16104 | 16119 | GCATGGCGACCTCAGG | 24 | 1619 |
| 915722 | 1036 | 1051 | 16156 | 16171 | GCCAAGGCAGCCGACT | 0 | 1620 |
| 915742 | 1123 | 1138 | 16243 | 16258 | GGCGAGAGGGTGTCCA | 0 | 1621 |
| 915762 | 1173 | 1188 | 19013 | 19028 | TGTATCCACCTTTGTC | 85 | 1622 |
| 915782 | 1228 | 1243 | 19068 | 19083 | GGCAGCATTACATAAG | 73 | 1623 |
| 915802 | 1283 | 1298 | N/A | N/A | CCATGTCACCAGTCTC | 59 | 1624 |
| 915822 | 1347 | 1362 | 23752 | 23767 | CTCGAGTGAACACCTG | 0 | 1625 |
| 915842 | 1404 | 1419 | 25167 | 25182 | CCTGTTGGCTGCTCAC | 88 | 1626 |
| 915862 | 1472 | 1487 | 25235 | 25250 | TGCTGGACAGCCCTTG | 0 | 1627 |
| 915882 | 1541 | 1556 | 25304 | 25319 | TTTATTGCCCAAGAAG | 38 | 1628 |
| 915902 | 1600 | 1615 | 25363 | 25378 | AGACTCTTCTCTAGTG | 60 | 1629 |
| 915922 | 1632 | 1647 | 25395 | 25410 | ATCTGCTAGACTCGCC | 86 | 1630 |
| 915942 | 1684 | 1699 | 25447 | 25462 | GCAATGCGGAGGTAGC | 38 | 1631 |
| 915962 | 1767 | 1782 | 25530 | 25545 | AAAGGTTGCTTCCTAG | 77 | 1632 |
| 915982 | 1787 | 1802 | 25550 | 25565 | GCTGGACCGCTGCACA | 79 | 1633 |
| 916002 | 1814 | 1829 | 25577 | 25592 | ACGCATGCTGATGTAT | 72 | 1634 |
| 916022 | 1841 | 1856 | 25604 | 25619 | GGTGTCATTTCCCAAC | 80 | 1635 |
| 916042 | 1883 | 1898 | 25646 | 25661 | CCACGAAACAGTCAGT | 87 | 1636 |
| 916062 | 1912 | 1927 | 25675 | 25690 | ATGCTGGAACAGTCTG | 78 | 1637 |
| 916082 | 1943 | 1958 | 25706 | 25721 | CCATCCAAACACCTGT | 64 | 1638 |
| 916102 | 1976 | 1991 | 25739 | 25754 | GGGCCAGCCTACCCCC | 0 | 1639 |
| 916122 | 2025 | 2040 | 25788 | 25803 | GAAGTGGGATCATGCT | 71 | 1640 |
| 916141 | 2097 | 2112 | 25860 | 25875 | ATCATCTTTGCAGACC | 91 | 1641 |
| 916161 | 2138 | 2153 | 25901 | 25916 | TTGTTACCCCCGCCAT | 89 | 1642 |
| 916181 | 2259 | 2274 | 26022 | 26037 | CTGATTCACATAATAC | 91 | 1643 |
| 916201 | 2623 | 2638 | 26386 | 26401 | CCTGCACACTAGATTA | 59 | 1644 |
| 916221 | 2676 | 2691 | 26439 | 26454 | AGGCGGAAGCTCCTGC | 0 | 1645 |
| 916241 | 2706 | 2721 | 26469 | 26484 | AGGTTCAAGTTGTGTG | 87 | 1646 |
| 916281 | N/A | N/A | 4224 | 4239 | AATGTACGGAATCTCA | 83 | 1647 |
| 916301 | N/A | N/A | 4810 | 4825 | GTCCATGTGGGTGTCC | 74 | 1648 |
| 916321 | N/A | N/A | 5399 | 5414 | GGCCTTAATGCTATCA | 13 | 1649 |
| 916341 | N/A | N/A | 5711 | 5726 | TAGTATGAAATATCTC | 96 | 1650 |
| 916361 | N/A | N/A | 6862 | 6877 | ATTGTAACTGCCAGGC | 0 | 1651 |
| 916381 | N/A | N/A | 7471 | 7486 | CCGGTATTCATTAGCA | 0 | 1652 |
| 916401 | N/A | N/A | 7728 | 7743 | GAGCAGGGCAACAAAC | 22 | 1653 |
| 916561 | N/A | N/A | 12315 | 12330 | ATATAACCACAGCCTG | 54 | 1654 |
| 916581 | N/A | N/A | 12906 | 12921 | GCTTATAAAGCACACG | 94 | 1655 |
| 916601 | N/A | N/A | 13702 | 13717 | TAGTAAATGCTTGTCA | 95 | 1656 |
| 916621 | N/A | N/A | 14123 | 14138 | GGCAGAAATGTGCTCT | 60 | 1657 |
| 916641 | N/A | N/A | 14632 | 14647 | CTTCATGCCATCCTGT | 83 | 1658 |
| 916661 | N/A | N/A | 15430 | 15445 | TGCTCTTACAGCATTG | 0 | 1659 |
| 916681 | N/A | N/A | 16262 | 16277 | GGTACCTGTAGCGAGC | 0 | 1660 |
| 916701 | N/A | N/A | 17197 | 17212 | TTGACTTAGTCCGTGT | 93 | 1661 |
| 916721 | N/A | N/A | 18220 | 18235 | AGCTACATCAGGCTGG | 0 | 1662 |
| 916741 | N/A | N/A | 19244 | 19259 | TGCACATAGACTGTGA | 0 | 1663 |
| 916760 | N/A | N/A | 20373 | 20388 | GACTGCTGAGCCAAGC | 61 | 1664 |
| 916780 | N/A | N/A | 20657 | 20672 | AGAAATTGCAGTGCCC | 92 | 1665 |
| 916800 | N/A | N/A | 20988 | 21003 | GGTATTAAACTGCCAA | 0 | 1666 |
| 916820 | N/A | N/A | 21447 | 21462 | TCACTAACCAATATAC | 47 | 1667 |
| 916840 | N/A | N/A | 22602 | 22617 | ATAAATCTGCAAGAGC | 62 | 1668 |
| 916860 | N/A | N/A | 23369 | 23384 | TCTCATGGTCAAGACC | 52 | 1669 |
| 916880 | N/A | N/A | 24305 | 24320 | GACTGCTAGGCTTCAC | 54 | 1670 |
| 916900 | N/A | N/A | 25100 | 25115 | CGCTGCTGCAGTGTGC | 34 | 1671 |

[0357] Human primer probe set RTS36075 (forward sequence TGAGGCTGGAGGGAGATG, designated herein as SEQ ID NO: 14; reverse sequence GCTCATGTATCCACCTTTGTCT, designated herein as SEQ ID NO: 15; probe sequence CTAGACCACCTGCGTCTCAGCATC, designated herein as SEQ ID NO: 16) was also used to measure mRNA levels. PNPLA3 mRNA levels were adjusted according to total RNA content, as measured by RIBOGREEN®. Results are presented as percent inhibition of PNPLA3, relative to untreated control cells.

TABLE 25
Inhibition of PNPLA3 mRNA by 3-10-3 cEt gapmers targeting SEQ ID NO: 1 and 2

| | SEQ | SEQ | SEQ | SEQ | | | |
|---|---|---|---|---|---|---|---|
| | ID | ID | ID | ID | | | |
| | NO: 1 | NO: 1 | NO: 2 | NO: 2 | | PNPLA3 | SEQ |
| Compound | Start | Stop | Start | Stop | | % | ID |
| Number | Site | Site | Site | Site | Sequence (5′ to 3′) | Inhibition | NO |
| 898558 | 581 | 596 | N/A | N/A | GGCATCCACGACTTCG | 87 | 1672 |
| 912709 | 27 | 42 | 2765 | 2780 | GGCATTCCCAGCGCGA | 0 | 17 |
| 912710 | 95 | 110 | 2833 | 2848 | TCCTGATCCGCAGCAG | 0 | 18 |
| 912711 | 103 | 118 | 2841 | 2856 | GGCTCGGGTCCTGATC | 0 | 19 |
| 912712 | 131 | 146 | 2869 | 2884 | GTTAGGATCTGGGTCG | 76 | 20 |
| 912713 | 164 | 179 | 2902 | 2917 | GTACATGGCGGCGGCG | 0 | 21 |
| 912714 | 183 | 198 | 2921 | 2936 | TCCAGCCGCGCTCTGC | 29 | 22 |
| 912715 | 196 | 211 | 2934 | 2949 | GCGAAGGACAAGCTCC | 31 | 23 |
| 912716 | 197 | 212 | 2935 | 2950 | CGCGAAGGACAAGCTC | 0 | 24 |
| 912717 | 272 | 287 | 3010 | 3025 | GCGGAGGAGGTGCGGG | 0 | 25 |
| 912718 | 273 | 288 | 3011 | 3026 | CGCGGAGGAGGTGCGG | 0 | 26 |
| 912719 | 274 | 289 | 3012 | 3027 | TCGCGGAGGAGGTGCG | 16 | 27 |
| 912720 | 290 | 305 | 3028 | 3043 | GAACAACATGCGCGCG | 0 | 28 |
| 912721 | 291 | 306 | 3029 | 3044 | CGAACAACATGCGCGC | 2 | 29 |
| 912722 | 292 | 307 | 3030 | 3045 | CCGAACAACATGCGCG | 0 | 30 |
| 912723 | 293 | 308 | 3031 | 3046 | GCCGAACAACATGCGC | 0 | 31 |
| 912724 | 294 | 309 | 3032 | 3047 | CGCCGAACAACATGCG | 0 | 32 |
| 912725 | 323 | 338 | 3061 | 3076 | GCCGACGCAGTGCAAC | 0 | 33 |
| 912726 | 324 | 339 | 3062 | 3077 | CGCCGACGCAGTGCAA | 0 | 34 |
| 912727 | 340 | 355 | 3078 | 3093 | GGGATACCGGAGAGGA | 32 | 35 |
| 912728 | 370 | 385 | 5944 | 5959 | TCTGAGAGGACCTGCA | 31 | 36 |
| 912729 | 375 | 390 | 5949 | 5964 | CAAGATCTGAGAGGAC | 60 | 37 |
| 912730 | 404 | 419 | 5978 | 5993 | GCCAATGTTCCGACTC | 52 | 38 |
| 912731 | 410 | 425 | 5984 | 5999 | GAAGATGCCAATGTTC | 31 | 39 |
| 912732 | 429 | 444 | 6003 | 6018 | TTAAGTTGAAGGATGG | 93 | 40 |
| 912733 | 432 | 447 | 6006 | 6021 | TGCTTAAGTTGAAGGA | 82 | 41 |
| 912734 | 478 | 493 | 6052 | 6067 | TGGACATTGGCCGGGA | 73 | 42 |
| 912735 | 479 | 494 | 6053 | 6068 | GTGGACATTGGCCGGG | 44 | 43 |
| 912736 | 484 | 499 | 6058 | 6073 | AGCTGGTGGACATTGG | 29 | 44 |
| 912737 | 528 | 543 | 6102 | 6117 | CATCAGACACTCTGGT | 0 | 45 |
| 912738 | 531 | 546 | 6105 | 6120 | CCCCATCAGACACTCT | 55 | 46 |
| 912739 | 552 | 567 | 6126 | 6141 | AGTCAGACACCAGAAC | 23 | 47 |
| 912740 | 582 | 597 | N/A | N/A | AGGCATCCACGACTTC | 40 | 1673 |
| 912741 | 584 | 599 | N/A | N/A | CAAGGCATCCACGACT | 55 | 1674 |
| 912742 | 591 | 606 | N/A | N/A | AACATACCAAGGCATC | 59 | 1675 |
| 912743 | 593 | 608 | N/A | N/A | GGAACATACCAAGGCA | 69 | 1676 |
| 912744 | 594 | 609 | 7824 | 7839 | AGGAACATACCAAGGC | 85 | 1677 |
| 912745 | 625 | 640 | 7855 | 7870 | GGGATAAGGCCACTGT | 71 | 1678 |
| 912746 | 626 | 641 | 7856 | 7871 | AGGGATAAGGCCACTG | 12 | 1679 |
| 912747 | 630 | 645 | 7860 | 7875 | AAGGAGGGATAAGGCC | 0 | 1680 |
| 912748 | 652 | 667 | N/A | N/A | ACATATCGCACGCCTC | 35 | 1681 |
| 912749 | 653 | 668 | N/A | N/A | CACATATCGCACGCCT | 3 | 1682 |
| 912750 | 654 | 669 | N/A | N/A | CCACATATCGCACGCC | 27 | 1683 |
| 912751 | 656 | 671 | N/A | N/A | ATCCACATATCGCACG | 24 | 1684 |
| 912752 | 660 | 675 | 11878 | 11893 | CTCCATCCACATATCG | 87 | 1685 |
| 912753 | 689 | 704 | 11907 | 11922 | ATCAATGAAGGGTACG | 79 | 1686 |
| 912754 | 690 | 705 | 11908 | 11923 | CATCAATGAAGGGTAC | 63 | 1687 |
| 912755 | 693 | 708 | 11911 | 11926 | TGGCATCAATGAAGGG | 68 | 48 |
| 912756 | 698 | 713 | 11916 | 11931 | TGTTTTGGCATCAATG | 88 | 49 |
| 912757 | 746 | 761 | 11964 | 11979 | TTTAGGGCAGATGTCG | 75 | 50 |
| 912758 | 747 | 762 | 11965 | 11980 | CTTTAGGGCAGATGTC | 82 | 51 |
| 912759 | 795 | 810 | 12013 | 12028 | GTAGACTGAGCTTGGT | 96 | 52 |
| 912760 | 820 | 835 | 12038 | 12053 | AGGTAGAGGTTCCCTG | 0 | 53 |
| 912761 | 841 | 856 | 12059 | 12074 | GGGACAAAAGCTCTCG | 0 | 54 |
| 912762 | 873 | 888 | 13609 | 13624 | GGCATATCTCTCCCAG | 0 | 55 |
| 912763 | 874 | 889 | 13610 | 13625 | AGGCATATCTCTCCCA | 0 | 56 |
| 912764 | 886 | 901 | 13622 | 13637 | AAATATCCTCGAAGGC | 71 | 57 |
| 912765 | 888 | 903 | 13624 | 13639 | CCAAATATCCTCGAAG | 37 | 58 |
| 912766 | 889 | 904 | 13625 | 13640 | TCCAAATATCCTCGAA | 0 | 59 |
| 912767 | 894 | 909 | 13630 | 13645 | ATGCATCCAAATATCC | 42 | 60 |
| 912768 | 925 | 940 | N/A | N/A | TTGCAGATGCCCTTCT | 5 | 61 |
| 912769 | 968 | 983 | 16088 | 16103 | ATCCATCCCTTCTGAG | 6 | 62 |
| 912770 | 986 | 1001 | 16106 | 16121 | GGGCATGGCGACCTCA | 0 | 63 |
| 912771 | 1004 | 1019 | 16124 | 16139 | ACTCATGTTTGCCCAG | 67 | 64 |
| 912782 | 1195 | 1210 | 19035 | 19050 | AGCAAGTTGCAAATCT | 71 | 75 |
| 912783 | 1199 | 1214 | 19039 | 19054 | GGGTAGCAAGTTGCAA | 37 | 76 |
| 912784 | 1205 | 1220 | 19045 | 19060 | CCTAATGGGTAGCAAG | 25 | 77 |
| 912785 | 1206 | 1221 | 19046 | 19061 | TCCTAATGGGTAGCAA | 64 | 78 |

TABLE 26
Inhibition of PNPLA3 mRNA by 3-10-3 cEt gapmers targeting SEQ ID NO: 1 and 2

| | SEQ | SEQ | SEQ | SEQ | | | |
|---|---|---|---|---|---|---|---|
| | ID | ID | ID | ID | | | |
| | NO: 1 | NO: 1 | NO: 2 | NO: 2 | | PNPLA3 | SEQ |
| Compound | Start | Stop | Start | Stop | | % | ID |
| Number | Site | Site | Site | Site | Sequence (5′ to 3′) | Inhibition | NO |
| 912786 | 1207 | 1222 | 19047 | 19062 | ATCCTAATGGGTAGCA | 65 | 79 |
| 912787 | 1211 | 1226 | 19051 | 19066 | CATTATCCTAATGGGT | 43 | 80 |
| 912788 | 1212 | 1227 | 19052 | 19067 | ACATTATCCTAATGGG | 0 | 81 |
| 912789 | 1213 | 1228 | 19053 | 19068 | GACATTATCCTAATGG | 59 | 82 |
| 912790 | 1220 | 1235 | 19060 | 19075 | TACATAAGACATTATC | 8 | 83 |
| 912791 | 1224 | 1239 | 19064 | 19079 | GCATTACATAAGACAT | 86 | 84 |
| 912792 | 1245 | 1260 | 19085 | 19100 | CCACAGGCAGGGTACA | 58 | 85 |
| 912793 | 1246 | 1261 | 19086 | 19101 | TCCACAGGCAGGGTAC | 5 | 86 |
| 912794 | 1253 | 1268 | 19093 | 19108 | GGCAGATTCCACAGGC | 68 | 87 |
| 912795 | 1259 | 1274 | 19099 | 19114 | CGCAATGGCAGATTCC | 84 | 88 |
| 912796 | 1265 | 1280 | 19105 | 19120 | GACAATCGCAATGGCA | 63 | 89 |
| 912797 | 1266 | 1281 | 19106 | 19121 | GGACAATCGCAATGGC | 54 | 90 |
| 912798 | 1267 | 1282 | 19107 | 19122 | TGGACAATCGCAATGG | 59 | 91 |
| 912799 | 1285 | 1300 | 23690 | 23705 | AGCCATGTCACCAGTC | 51 | 92 |
| 912800 | 1289 | 1304 | 23694 | 23709 | TGGAAGCCATGTCACC | 32 | 93 |
| 912801 | 1290 | 1305 | 23695 | 23710 | CTGGAAGCCATGTCAC | 44 | 94 |
| 912802 | 1297 | 1312 | 23702 | 23717 | GGCATATCTGGAAGCC | 0 | 95 |
| 912803 | 1298 | 1313 | 23703 | 23718 | GGGCATATCTGGAAGC | 0 | 96 |
| 912804 | 1351 | 1366 | 23756 | 23771 | AGCACTCGAGTGAACA | 6 | 97 |
| 912805 | 1386 | 1401 | N/A | N/A | GCATTTGGGACCTGGA | 54 | 98 |
| 912806 | 1387 | 1402 | N/A | N/A | GGCATTTGGGACCTGG | 33 | 99 |
| 912807 | 1388 | 1403 | 25151 | 25166 | TGGCATTTGGGACCTG | 0 | 100 |
| 912808 | 1394 | 1409 | 25157 | 25172 | GCTCACTGGCATTTGG | 7 | 101 |
| 912809 | 1523 | 1538 | 25286 | 25301 | GTTCAGGCTGGACCTG | 17 | 102 |
| 912810 | 1547 | 1562 | 25310 | 25325 | AGGTACTTTATTGCCC | 30 | 103 |
| 912811 | 1550 | 1565 | 25313 | 25328 | AGCAGGTACTTTATTG | 55 | 104 |
| 912812 | 1653 | 1668 | 25416 | 25431 | AACTTTAGCACCTCTG | 87 | 105 |
| 912813 | 1655 | 1670 | 25418 | 25433 | GAAACTTTAGCACCTC | 85 | 106 |
| 912814 | 1656 | 1671 | 25419 | 25434 | GGAAACTTTAGCACCT | 26 | 107 |
| 912815 | 1669 | 1684 | 25432 | 25447 | CTGCACAAAGATGGGA | 66 | 108 |
| 912816 | 1671 | 1686 | 25434 | 25449 | AGCTGCACAAAGATGG | 41 | 109 |
| 912817 | 1685 | 1700 | 25448 | 25463 | AGCAATGCGGAGGTAG | 35 | 110 |
| 912818 | 1740 | 1755 | 25503 | 25518 | ACCAACTCAGCTCAGA | 76 | 111 |
| 912819 | 1741 | 1756 | 25504 | 25519 | AACCAACTCAGCTCAG | 77 | 112 |
| 912820 | 1757 | 1772 | 25520 | 25535 | TCCTAGCTTTTCATAA | 18 | 113 |
| 912821 | 1788 | 1803 | 25551 | 25566 | TGCTGGACCGCTGCAC | 1 | 114 |
| 912822 | 1796 | 1811 | 25559 | 25574 | GAGTTAAGTGCTGGAC | 90 | 115 |
| 912823 | 1802 | 1817 | 25565 | 25580 | GTATTAGAGTTAAGTG | 86 | 116 |
| 912824 | 1803 | 1818 | 25566 | 25581 | TGTATTAGAGTTAAGT | 79 | 117 |
| 912825 | 1806 | 1821 | 25569 | 25584 | TGATGTATTAGAGTTA | 89 | 118 |
| 912826 | 1808 | 1823 | 25571 | 25586 | GCTGATGTATTAGAGT | 79 | 119 |
| 912827 | 1821 | 1836 | 25584 | 25599 | TGAATTAACGCATGCT | 73 | 120 |
| 912828 | 1822 | 1837 | 25585 | 25600 | CTGAATTAACGCATGC | 69 | 121 |
| 912829 | 1870 | 1885 | 25633 | 25648 | AGTAAGGGACCCTCTG | 0 | 122 |
| 912830 | 1871 | 1886 | 25634 | 25649 | CAGTAAGGGACCCTCT | 44 | 123 |
| 912831 | 1872 | 1887 | 25635 | 25650 | TCAGTAAGGGACCCTC | 67 | 124 |
| 912832 | 1874 | 1889 | 25637 | 25652 | AGTCAGTAAGGGACCC | 50 | 125 |
| 912833 | 1893 | 1908 | 25656 | 25671 | ATTAATAGGGCCACGA | 78 | 126 |
| 912834 | 1895 | 1910 | 25658 | 25673 | CCATTAATAGGGCCAC | 72 | 127 |
| 912835 | 1896 | 1911 | 25659 | 25674 | ACCATTAATAGGGCCA | 65 | 128 |
| 912836 | 1906 | 1921 | 25669 | 25684 | GAACAGTCTGACCATT | 82 | 129 |
| 912837 | 1908 | 1923 | 25671 | 25686 | TGGAACAGTCTGACCA | 39 | 130 |
| 912838 | 1909 | 1924 | 25672 | 25687 | CTGGAACAGTCTGACC | 84 | 131 |
| 912839 | 1911 | 1926 | 25674 | 25689 | TGCTGGAACAGTCTGA | 72 | 132 |
| 912840 | 1916 | 1931 | 25679 | 25694 | CCTCATGCTGGAACAG | 84 | 133 |
| 912841 | 1928 | 1943 | 25691 | 25706 | TCATTCTAAGAACCTC | 87 | 134 |
| 912842 | 1945 | 1960 | 25708 | 25723 | ACCCATCCAAACACCT | 18 | 135 |
| 912843 | 1982 | 1997 | 25745 | 25760 | ACACATGGGCCAGCCT | 46 | 136 |
| 912844 | 1989 | 2004 | 25752 | 25767 | CAAGATCACACATGGG | 71 | 137 |
| 912845 | 2057 | 2072 | 25820 | 25835 | GGGACGAACTGCACCC | 0 | 138 |
| 912846 | 2098 | 2113 | 25861 | 25876 | TATCATCTTTGCAGAC | 68 | 139 |
| 912847 | 2116 | 2131 | 25879 | 25894 | GTTTTTAGTAGTCAAG | 90 | 140 |
| 912848 | 2117 | 2132 | 25880 | 25895 | CGTTTTTAGTAGTCAA | 94 | 141 |
| 912849 | 2145 | 2160 | 25908 | 25923 | TATCATCTTGTTACCC | 87 | 142 |
| 912850 | 2148 | 2163 | 25911 | 25926 | GATTATCATCTTGTTA | 60 | 143 |
| 912851 | 2150 | 2165 | 25913 | 25928 | TAGATTATCATCTTGT | 50 | 144 |
| 912852 | 2151 | 2166 | 25914 | 25929 | GTAGATTATCATCTTG | 72 | 145 |
| 912853 | 2152 | 2167 | 25915 | 25930 | AGTAGATTATCATCTT | 79 | 146 |
| 912854 | 2175 | 2190 | 25938 | 25953 | GTGAAAAAGGTGTTCT | 64 | 147 |
| 912855 | 2182 | 2197 | 25945 | 25960 | TAGTTAGGTGAAAAAG | 77 | 148 |
| 912856 | 2188 | 2203 | 25951 | 25966 | TTATTTTAGTTAGGTG | 82 | 149 |
| 912857 | 2190 | 2205 | 25953 | 25968 | CATTATTTTAGTTAGG | 77 | 150 |
| 912858 | 2273 | 2288 | 26036 | 26051 | CTACTAACATCTCACT | 48 | 151 |
| 912859 | 2274 | 2289 | 26037 | 26052 | TCTACTAACATCTCAC | 91 | 152 |
| 912860 | 2278 | 2293 | 26041 | 26056 | TTATTCTACTAACATC | 37 | 153 |
| 912861 | 2280 | 2295 | 26043 | 26058 | GCTTATTCTACTAACA | 77 | 154 |
| 912862 | 2281 | 2296 | 26044 | 26059 | GGCTTATTCTACTAAC | 70 | 155 |
| 912863 | 2632 | 2647 | 26395 | 26410 | GGTGAATGCCCTGCAC | 42 | 156 |

### Study 2

[0358] Cultured A431 cells at a density of 5,000 cells per well were transfected by free uptake with 1,000 nM antisense oligonucleotide. After a treatment period of approximately 24 hours, RNA was isolated from the cells and PNPLA3 mRNA levels were measured by quantitative real-time PCR. Human primer probe set RTS36070 was used to measure mRNA levels. PNPLA3 mRNA levels were adjusted according to total RNA content, as measured by RIBOGREEN®. Results are presented as percent inhibition of PNPLA3, relative to untreated control cells.

TABLE 27
Inhibition of PNPLA3 mRNA by 3-10-3 cEt gapmers targeting SEQ ID NO: 1 and 2

| | SEQ | SEQ | SEQ | SEQ | | | |
|---|---|---|---|---|---|---|---|
| | ID | ID | ID | ID | | | |
| | NO: 1 | NO: 1 | NO: 2 | NO: 2 | | PNPLA3 | SEQ |
| Compound | Start | Stop | Start | Stop | | % | ID |
| Number | Site | Site | Site | Site | Sequence (5′ to 3′) | Inhibition | NO |
| 915609 | 705 | 720 | 11923 | 11938 | TGATGGTTGTTTTGGC | 97 | 702 |
| 959270 | 413 | 428 | 5987 | 6002 | ATGGAAGATGCCAATG | 32 | 1688 |
| 959280 | 491 | 506 | 6065 | 6080 | GGAGATGAGCTGGTGG | 66 | 1689 |
| 959290 | 793 | 808 | 12011 | 12026 | AGACTGAGCTTGGTGA | 78 | 1690 |
| 959300 | 899 | 914 | 13635 | 13650 | CCTGAATGCATCCAAA | 69 | 1691 |
| 959310 | 1084 | 1099 | 16204 | 16219 | ATGCTGAGACGCAGGT | 0 | 1692 |
| 959320 | 1256 | 1271 | 19096 | 19111 | AATGGCAGATTCCACA | 25 | 1693 |
| 959330 | 1642 | 1657 | 25405 | 25420 | CTCTGAAAGAATCTGC | 75 | 1694 |
| 959340 | 1659 | 1674 | 25422 | 25437 | ATGGGAAACTTTAGCA | 77 | 1695 |
| 959350 | 1839 | 1854 | 25602 | 25617 | TGTCATTTCCCAACCA | 79 | 1696 |
| 959360 | 2114 | 2129 | 25877 | 25892 | TTTTAGTAGTCAAGGT | 88 | 1697 |
| 959370 | 2223 | 2238 | 25986 | 26001 | GCTTCCTTACATTTTT | 85 | 1698 |
| 959380 | 2269 | 2284 | 26032 | 26047 | TAACATCTCACTGATT | 42 | 1699 |
| 959390 | N/A | N/A | 4311 | 4326 | CTAGTGAGAAACAAAC | 0 | 1700 |
| 959400 | N/A | N/A | 4761 | 4776 | TTATTGTTGCTAAACC | 32 | 1701 |
| 959410 | N/A | N/A | 4863 | 4878 | ACTTTAGGCTCCTGGG | 60 | 1702 |
| 959420 | N/A | N/A | 5285 | 5300 | AGCCATAAATCTTGGG | 24 | 1703 |
| 959430 | N/A | N/A | 5573 | 5588 | ATGACATCATGGCTTC | 93 | 1704 |
| 959440 | N/A | N/A | 5603 | 5618 | TTATTCAATGTGGCTT | 95 | 1705 |
| 959450 | N/A | N/A | 5640 | 5655 | GGGCTCAATGAAATTA | 12 | 1706 |
| 959460 | N/A | N/A | 5713 | 5728 | CTTAGTATGAAATATC | 86 | 1707 |
| 959470 | N/A | N/A | 5808 | 5823 | TACTGTCTACTATGGG | 91 | 1708 |
| 959480 | N/A | N/A | 6157 | 6172 | CTTACATCCACGACTT | 35 | 1709 |
| 959660 | N/A | N/A | 12153 | 12168 | CAGTAACTGGTAGCTC | 74 | 1710 |
| 959670 | N/A | N/A | 12169 | 12184 | TGTTTGATTGTGCAGA | 95 | 1711 |
| 959680 | N/A | N/A | 12210 | 12225 | CGCCTTTTATTTCCGT | 92 | 1712 |
| 959690 | N/A | N/A | 12313 | 12328 | ATAACCACAGCCTGGG | 66 | 1713 |
| 959700 | N/A | N/A | 12675 | 12690 | ATAAGAATCATCTTAG | 7 | 1714 |
| 959710 | N/A | N/A | 12711 | 12726 | ACTACCGAACGCAGTT | 41 | 1715 |
| 959720 | N/A | N/A | 12757 | 12772 | TAGAGTGGTAAGGCAT | 84 | 1716 |
| 959730 | N/A | N/A | 12793 | 12808 | GGTTGGTGTACATGGT | 96 | 1717 |
| 959740 | N/A | N/A | 12880 | 12895 | TCCTGTTAGACAGCTT | 93 | 1718 |
| 959750 | N/A | N/A | 12902 | 12917 | ATAAAGCACACGGGAA | 86 | 1719 |
| 959760 | N/A | N/A | 12931 | 12946 | TAAGAGCTGTCTCCTC | 85 | 1720 |
| 959770 | N/A | N/A | 12972 | 12987 | CTAACAAACTTTGCAG | 79 | 1721 |
| 959780 | N/A | N/A | 13392 | 13407 | TGTCACCCTTCCACGG | 15 | 1722 |
| 959790 | N/A | N/A | 13526 | 13541 | ATTGGAAGACCGCAGA | 43 | 1723 |
| 959800 | N/A | N/A | 13706 | 13721 | CCGCTAGTAAATGCTT | 44 | 1724 |
| 959810 | N/A | N/A | 13737 | 13752 | AACTAAGGCAAATCTC | 77 | 1725 |
| 959820 | N/A | N/A | 13915 | 13930 | GAGTCATGACATCCCA | 89 | 1726 |
| 959830 | N/A | N/A | 14299 | 14314 | GCAGATAAATACACAT | 93 | 1727 |
| 959840 | N/A | N/A | 14424 | 14439 | TTTCCCATCGACACAG | 78 | 1728 |
| 959850 | N/A | N/A | 14571 | 14586 | GCTCCTACTTATCCCC | 76 | 1729 |
| 959860 | N/A | N/A | 15202 | 15217 | TATTGCCAGGTATCTG | 64 | 1730 |
| 959870 | N/A | N/A | 15599 | 15614 | CAATACATAGCAGAGC | 23 | 1731 |
| 959880 | N/A | N/A | 17192 | 17207 | TTAGTCCGTGTTCAGG | 90 | 1732 |
| 959890 | N/A | N/A | 17222 | 17237 | GTAGCTGGTTTGTGGG | 20 | 1733 |
| 959900 | N/A | N/A | 17295 | 17310 | CATCTCTTAGGGCACC | 79 | 1734 |
| 959910 | N/A | N/A | 18393 | 18408 | GTTTGGAAGTCGCCAT | 77 | 1735 |
| 959920 | N/A | N/A | 20284 | 20299 | AGGAAGCCCAATCAAG | 85 | 1736 |
| 959930 | N/A | N/A | 20512 | 20527 | CAGATTGAGTCTCCTG | 10 | 1737 |
| 959940 | N/A | N/A | 20607 | 20622 | TTTTACGATCATCATT | 72 | 1738 |
| 959950 | N/A | N/A | 20661 | 20676 | GCTTAGAAATTGCAGT | 75 | 1739 |
| 959960 | N/A | N/A | 20812 | 20827 | AGGGTAATATTCAGAC | 86 | 1740 |
| 959970 | N/A | N/A | 20934 | 20949 | TGTAGCAGACAGATCA | 74 | 1741 |
| 959980 | N/A | N/A | 21000 | 21015 | TTTAACAGCTCAGGTA | 66 | 1742 |
| 959990 | N/A | N/A | 21405 | 21420 | ATTCTAGACATGGCCA | 51 | 1743 |
| 960000 | N/A | N/A | 21442 | 21457 | AACCAATATACTGAGA | 71 | 1744 |
| 960010 | N/A | N/A | 21545 | 21560 | AGACATATGACATTTC | 91 | 1745 |
| 960020 | N/A | N/A | 22765 | 22780 | ACATGACAGACTAACT | 55 | 1746 |
| 960030 | N/A | N/A | 24039 | 24054 | CATCAATGCTGCACTC | 13 | 1747 |

TABLE 28
Inhibition of PNPLA3 mRNA by 3-10-3 cEt gapmers targeting SEQ ID NO: 1 and 2

| | SEQ | SEQ | SEQ | SEQ | | | |
|---|---|---|---|---|---|---|---|
| | ID | ID | ID | ID | | | |
| | NO: 1 | NO: 1 | NO: 2 | NO: 2 | | PNPLA3 | SEQ |
| Compound | Start | Stop | Start | Stop | | % | ID |
| Number | Site | Site | Site | Site | Sequence (5′ to 3′) | Inhibition | NO |
| 915609 | 705 | 720 | 11923 | 11938 | TGATGGTTGTTTTGGC | 98 | 702 |
| 959271 | 425 | 440 | 5999 | 6014 | GTTGAAGGATGGATGG | 90 | 1748 |
| 959281 | 511 | 526 | 6085 | 6100 | AGAGAGATGCCTATTT | 73 | 1749 |
| 959291 | 813 | 828 | 12031 | 12046 | GGTTCCCTGTGCAGAG | 79 | 1750 |
| 959301 | 904 | 919 | 13640 | 13655 | AAGAACCTGAATGCAT | 48 | 1751 |
| 959311 | 1085 | 1100 | 16205 | 16220 | GATGCTGAGACGCAGG | 0 | 1752 |
| 959321 | 1602 | 1617 | 25365 | 25380 | ACAGACTCTTCTCTAG | 45 | 1753 |
| 959331 | 1643 | 1658 | 25406 | 25421 | CCTCTGAAAGAATCTG | 81 | 1754 |
| 959341 | 1673 | 1688 | 25436 | 25451 | GTAGCTGCACAAAGAT | 69 | 1755 |
| 959351 | 1842 | 1857 | 25605 | 25620 | TGGTGTCATTTCCCAA | 19 | 1756 |
| 959361 | 2115 | 2130 | 25878 | 25893 | TTTTTAGTAGTCAAGG | 91 | 1757 |
| 959371 | 2240 | 2255 | 26003 | 26018 | ATTCAACAGGTAACAA | 69 | 1758 |
| 959381 | 2271 | 2286 | 26034 | 26049 | ACTAACATCTCACTGA | 33 | 1759 |
| 959391 | N/A | N/A | 4313 | 4328 | AGCTAGTGAGAAACAA | 47 | 1760 |
| 959401 | N/A | N/A | 4764 | 4779 | CTTTTATTGTTGCTAA | 77 | 1761 |
| 959411 | N/A | N/A | 4868 | 4883 | AGTGTACTTTAGGCTC | 90 | 1762 |
| 959421 | N/A | N/A | 5286 | 5301 | CAGCCATAAATCTTGG | 0 | 1763 |
| 959431 | N/A | N/A | 5574 | 5589 | AATGACATCATGGCTT | 74 | 1764 |
| 959441 | N/A | N/A | 5604 | 5619 | TTTATTCAATGTGGCT | 96 | 1765 |
| 959451 | N/A | N/A | 5642 | 5657 | TTGGGCTCAATGAAAT | 0 | 1766 |
| 959461 | N/A | N/A | 5714 | 5729 | GCTTAGTATGAAATAT | 78 | 1767 |
| 959471 | N/A | N/A | 5809 | 5824 | GTACTGTCTACTATGG | 78 | 1768 |
| 959481 | N/A | N/A | 6160 | 6175 | CTGCTTACATCCACGA | 4 | 1769 |
| 959661 | N/A | N/A | 12154 | 12169 | ACAGTAACTGGTAGCT | 72 | 1770 |
| 959671 | N/A | N/A | 12170 | 12185 | CTGTTTGATTGTGCAG | 50 | 1771 |
| 959681 | N/A | N/A | 12211 | 12226 | GCGCCTTTTATTTCCG | 14 | 1772 |
| 959691 | N/A | N/A | 12322 | 12337 | CCTGACTATATAACCA | 56 | 1773 |
| 959701 | N/A | N/A | 12689 | 12704 | GACCGTGTTTCCAAAT | 97 | 1774 |
| 959711 | N/A | N/A | 12712 | 12727 | AACTACCGAACGCAGT | 48 | 1775 |
| 959721 | N/A | N/A | 12759 | 12774 | GGTAGAGTGGTAAGGC | 95 | 1776 |
| 959731 | N/A | N/A | 12828 | 12843 | CATAGCCTTCTTTCTT | 93 | 1777 |
| 959741 | N/A | N/A | 12882 | 12897 | AATCCTGTTAGACAGC | 90 | 1778 |
| 959751 | N/A | N/A | 12903 | 12918 | TATAAAGCACACGGGA | 82 | 1779 |
| 959761 | N/A | N/A | 12933 | 12948 | AATAAGAGCTGTCTCC | 87 | 1780 |
| 959771 | N/A | N/A | 12974 | 12989 | CCCTAACAAACTTTGC | 62 | 1781 |
| 959781 | N/A | N/A | 13394 | 13409 | AATGTCACCCTTCCAC | 90 | 1782 |
| 959791 | N/A | N/A | 13527 | 13542 | CATTGGAAGACCGCAG | 76 | 1783 |
| 959801 | N/A | N/A | 13707 | 13722 | ACCGCTAGTAAATGCT | 35 | 1784 |
| 959811 | N/A | N/A | 13740 | 13755 | TAGAACTAAGGCAAAT | 65 | 1785 |
| 959821 | N/A | N/A | 13916 | 13931 | GGAGTCATGACATCCC | 42 | 1786 |
| 959831 | N/A | N/A | 14302 | 14317 | TGAGCAGATAAATACA | 75 | 1787 |
| 959841 | N/A | N/A | 14425 | 14440 | CTTTCCCATCGACACA | 79 | 1788 |
| 959851 | N/A | N/A | 14573 | 14588 | GCGCTCCTACTTATCC | 0 | 1789 |
| 959861 | N/A | N/A | 15203 | 15218 | ATATTGCCAGGTATCT | 67 | 1790 |
| 959871 | N/A | N/A | 15763 | 15778 | GTGTTGGTTTATAACA | 13 | 1791 |
| 959881 | N/A | N/A | 17194 | 17209 | ACTTAGTCCGTGTTCA | 45 | 1792 |
| 959891 | N/A | N/A | 17224 | 17239 | CTGTAGCTGGTTTGTG | 42 | 1793 |
| 959901 | N/A | N/A | 17296 | 17311 | CCATCTCTTAGGGCAC | 53 | 1794 |
| 959911 | N/A | N/A | 18394 | 18409 | TGTTTGGAAGTCGCCA | 87 | 1795 |
| 959921 | N/A | N/A | 20289 | 20304 | ATCAGAGGAAGCCCAA | 84 | 1796 |
| 959931 | N/A | N/A | 20514 | 20529 | ACCAGATTGAGTCTCC | 91 | 1797 |
| 959941 | N/A | N/A | 20613 | 20628 | CTCTAATTTTACGATC | 70 | 1798 |
| 959951 | N/A | N/A | 20662 | 20677 | AGCTTAGAAATTGCAG | 0 | 1799 |
| 959961 | N/A | N/A | 20813 | 20828 | CAGGGTAATATTCAGA | 87 | 1800 |
| 959971 | N/A | N/A | 20936 | 20951 | TTTGTAGCAGACAGAT | 18 | 1801 |
| 959981 | N/A | N/A | 21001 | 21016 | TTTTAACAGCTCAGGT | 71 | 1802 |
| 959991 | N/A | N/A | 21406 | 21421 | AATTCTAGACATGGCC | 25 | 1803 |
| 960001 | N/A | N/A | 21443 | 21458 | TAACCAATATACTGAG | 72 | 1804 |
| 960011 | N/A | N/A | 22023 | 22038 | CGCAAAAAGACAACGA | 16 | 1805 |
| 960021 | N/A | N/A | 22766 | 22781 | GACATGACAGACTAAC | 76 | 1806 |
| 960031 | N/A | N/A | 24040 | 24055 | CCATCAATGCTGCACT | 61 | 1807 |

TABLE 29
Inhibition of PNPLA3 mRNA by 3-10-3 cEt gapmers targeting SEQ ID NO: 1 and 2

| | SEQ | SEQ | SEQ | SEQ | | | |
|---|---|---|---|---|---|---|---|
| | ID | ID | ID | ID | | | |
| | NO: 1 | NO: 1 | NO: 2 | NO: 2 | | PNPLA3 | SEQ |
| Compound | Start | Stop | Start | Stop | | % | ID |
| Number | Site | Site | Site | Site | Sequence (5′ to 3′) | Inhibition | NO |
| 915609 | 705 | 720 | 11923 | 11938 | TGATGGTTGTTTTGGC | 97 | 702 |
| 959272 | 426 | 441 | 6000 | 6015 | AGTTGAAGGATGGATG | 76 | 1808 |
| 959282 | 517 | 532 | 6091 | 6106 | CTGGTAAGAGAGATGC | 64 | 1809 |
| 959292 | 815 | 830 | 12033 | 12048 | GAGGTTCCCTGTGCAG | 81 | 1810 |
| 959302 | 905 | 920 | 13641 | 13656 | CAAGAACCTGAATGCA | 65 | 1811 |
| 959312 | 1087 | 1102 | 16207 | 16222 | AGGATGCTGAGACGCA | 66 | 1812 |
| 959322 | 1604 | 1619 | 25367 | 25382 | TCACAGACTCTTCTCT | 50 | 1813 |
| 959332 | 1644 | 1659 | 25407 | 25422 | ACCTCTGAAAGAATCT | 69 | 1814 |
| 959342 | 1675 | 1690 | 25438 | 25453 | AGGTAGCTGCACAAAG | 78 | 1815 |
| 959352 | 1903 | 1918 | 25666 | 25681 | CAGTCTGACCATTAAT | 77 | 1816 |
| 959362 | 2173 | 2188 | 25936 | 25951 | GAAAAAGGTGTTCTAA | 85 | 1817 |
| 959372 | 2242 | 2257 | 26005 | 26020 | AAATTCAACAGGTAAC | 62 | 1818 |
| 959382 | 2275 | 2290 | 26038 | 26053 | TTCTACTAACATCTCA | 80 | 1819 |
| 959392 | N/A | N/A | 4732 | 4747 | ATGATCATGTGGCGGT | 80 | 1820 |
| 959402 | N/A | N/A | 4765 | 4780 | ACTTTTATTGTTGCTA | 86 | 1821 |
| 959412 | N/A | N/A | 4869 | 4884 | GAGTGTACTTTAGGCT | 94 | 1822 |
| 959422 | N/A | N/A | 5389 | 5404 | CTATCAGGTGCAGGAG | 93 | 1823 |
| 959432 | N/A | N/A | 5575 | 5590 | CAATGACATCATGGCT | 90 | 1824 |
| 959442 | N/A | N/A | 5607 | 5622 | TACTTTATTCAATGTG | 0 | 1825 |
| 959452 | N/A | N/A | 5643 | 5658 | ATTGGGCTCAATGAAA | 35 | 1826 |
| 959462 | N/A | N/A | 5716 | 5731 | TGGCTTAGTATGAAAT | 80 | 1827 |
| 959472 | N/A | N/A | 5864 | 5879 | TTTGGCAAGGCCAGAA | 0 | 1828 |
| 959482 | N/A | N/A | 6960 | 6975 | GCATAGAGGAAGCTCG | 32 | 1829 |
| 959662 | N/A | N/A | 12155 | 12170 | GACAGTAACTGGTAGC | 92 | 1830 |
| 959672 | N/A | N/A | 12172 | 12187 | TTCTGTTTGATTGTGC | 97 | 1831 |
| 959682 | N/A | N/A | 12280 | 12295 | AGGTCTGGGTATATGT | 93 | 1832 |
| 959692 | N/A | N/A | 12323 | 12338 | CCCTGACTATATAACC | 32 | 1833 |
| 959702 | N/A | N/A | 12691 | 12706 | TTGACCGTGTTTCCAA | 94 | 1834 |
| 959712 | N/A | N/A | 12713 | 12728 | AAACTACCGAACGCAG | 92 | 1835 |
| 959722 | N/A | N/A | 12760 | 12775 | TGGTAGAGTGGTAAGG | 94 | 1836 |
| 959732 | N/A | N/A | 12829 | 12844 | GCATAGCCTTCTTTCT | 87 | 1837 |
| 959742 | N/A | N/A | 12883 | 12898 | CAATCCTGTTAGACAG | 13 | 1838 |
| 959752 | N/A | N/A | 12904 | 12919 | TTATAAAGCACACGGG | 87 | 1839 |
| 959762 | N/A | N/A | 12934 | 12949 | CAATAAGAGCTGTCTC | 81 | 1840 |
| 959772 | N/A | N/A | 13370 | 13385 | TGCAGGCACCCCAGCA | 0 | 1841 |
| 959782 | N/A | N/A | 13395 | 13410 | GAATGTCACCCTTCCA | 90 | 1842 |
| 959792 | N/A | N/A | 13528 | 13543 | TCATTGGAAGACCGCA | 84 | 1843 |
| 959802 | N/A | N/A | 13708 | 13723 | GACCGCTAGTAAATGC | 57 | 1844 |
| 959812 | N/A | N/A | 13741 | 13756 | TTAGAACTAAGGCAAA | 78 | 1845 |
| 959822 | N/A | N/A | 13917 | 13932 | TGGAGTCATGACATCC | 0 | 1846 |
| 959832 | N/A | N/A | 14303 | 14318 | CTGAGCAGATAAATAC | 74 | 1847 |
| 959842 | N/A | N/A | 14553 | 14568 | AGTCTTAATGTGGATT | 76 | 1848 |
| 959852 | N/A | N/A | 14667 | 14682 | AGTGTCCCCATCCCCA | 54 | 1849 |
| 959862 | N/A | N/A | 15204 | 15219 | AATATTGCCAGGTATC | 56 | 1850 |
| 959872 | N/A | N/A | 15765 | 15780 | TAGTGTTGGTTTATAA | 89 | 1851 |
| 959882 | N/A | N/A | 17196 | 17211 | TGACTTAGTCCGTGTT | 43 | 1852 |
| 959892 | N/A | N/A | 17225 | 17240 | TCTGTAGCTGGTTTGT | 61 | 1853 |
| 959902 | N/A | N/A | 17298 | 17313 | TCCCATCTCTTAGGGC | 24 | 1854 |
| 959912 | N/A | N/A | 18396 | 18411 | TATGTTTGGAAGTCGC | 91 | 1855 |
| 959922 | N/A | N/A | 20290 | 20305 | AATCAGAGGAAGCCCA | 40 | 1856 |
| 959932 | N/A | N/A | 20515 | 20530 | AACCAGATTGAGTCTC | 72 | 1857 |
| 959942 | N/A | N/A | 20614 | 20629 | TCTCTAATTTTACGAT | 23 | 1858 |
| 959952 | N/A | N/A | 20663 | 20678 | CAGCTTAGAAATTGCA | 24 | 1859 |
| 959962 | N/A | N/A | 20814 | 20829 | CCAGGGTAATATTCAG | 87 | 1860 |
| 959972 | N/A | N/A | 20937 | 20952 | CTTTGTAGCAGACAGA | 50 | 1861 |
| 959982 | N/A | N/A | 21003 | 21018 | TATTTTAACAGCTCAG | 94 | 1862 |
| 959992 | N/A | N/A | 21409 | 21424 | TGCAATTCTAGACATG | 12 | 1863 |
| 960002 | N/A | N/A | 21445 | 21460 | ACTAACCAATATACTG | 55 | 1864 |
| 960012 | N/A | N/A | 22541 | 22556 | CAACAGATTACTGGAC | 28 | 1865 |
| 960022 | N/A | N/A | 22768 | 22783 | AGGACATGACAGACTA | 66 | 1866 |
| 960032 | N/A | N/A | 24041 | 24056 | ACCATCAATGCTGCAC | 79 | 1867 |

TABLE 30
Inhibition of PNPLA3 mRNA by 3-10-3 cEt gapmers targeting SEQ ID NO: 1 and 2

| | SEQ | SEQ | SEQ | SEQ | | | |
|---|---|---|---|---|---|---|---|
| | ID | ID | ID | ID | | | |
| | NO: 1 | NO: 1 | NO: 2 | NO: 2 | | PNPLA3 | SEQ |
| Compound | Start | Stop | Start | Stop | | % | ID |
| Number | Site | Site | Site | Site | Sequence (5′ to 3′) | Inhibition | NO |
| 915609 | 705 | 720 | 11923 | 11938 | TGATGGTTGTTTTGGC | 98 | 702 |
| 959273 | 427 | 442 | 6001 | 6016 | AAGTTGAAGGATGGAT | 86 | 1868 |
| 959283 | 694 | 709 | 11912 | 11927 | TTGGCATCAATGAAGG | 73 | 1869 |
| 959293 | 816 | 831 | 12034 | 12049 | AGAGGTTCCCTGTGCA | 80 | 1870 |
| 959303 | 906 | 921 | 13642 | 13657 | CCAAGAACCTGAATGC | 65 | 1871 |
| 959313 | 1090 | 1105 | 16210 | 16225 | GGCAGGATGCTGAGAC | 43 | 1872 |
| 959323 | 1605 | 1620 | 25368 | 25383 | CTCACAGACTCTTCTC | 81 | 1873 |
| 959333 | 1646 | 1661 | 25409 | 25424 | GCACCTCTGAAAGAAT | 51 | 1874 |
| 959343 | 1677 | 1692 | 25440 | 25455 | GGAGGTAGCTGCACAA | 73 | 1875 |
| 959353 | 1904 | 1919 | 25667 | 25682 | ACAGTCTGACCATTAA | 85 | 1876 |
| 959363 | 2179 | 2194 | 25942 | 25957 | TTAGGTGAAAAAGGTG | 91 | 1877 |
| 959373 | 2258 | 2273 | 26021 | 26036 | TGATTCACATAATACA | 71 | 1878 |
| 959383 | 2277 | 2292 | 26040 | 26055 | TATTCTACTAACATCT | 38 | 1879 |
| 959393 | N/A | N/A | 4733 | 4748 | AATGATCATGTGGCGG | 93 | 1880 |
| 959403 | N/A | N/A | 4767 | 4782 | TGACTTTTATTGTTGC | 87 | 1881 |
| 959413 | N/A | N/A | 4870 | 4885 | TGAGTGTACTTTAGGC | 94 | 1882 |
| 959423 | N/A | N/A | 5392 | 5407 | ATGCTATCAGGTGCAG | 0 | 1883 |
| 959433 | N/A | N/A | 5578 | 5593 | GCACAATGACATCATG | 86 | 1884 |
| 959443 | N/A | N/A | 5608 | 5623 | TTACTTTATTCAATGT | 9 | 1885 |
| 959453 | N/A | N/A | 5644 | 5659 | TATTGGGCTCAATGAA | 80 | 1886 |
| 959463 | N/A | N/A | 5798 | 5813 | TATGGGAGCCACATGT | 4 | 1887 |
| 959473 | N/A | N/A | 5866 | 5881 | CTTTTGGCAAGGCCAG | 0 | 1888 |
| 959483 | N/A | N/A | 7199 | 7214 | TTAAACAGAGGATGCA | 31 | 1889 |
| 959663 | N/A | N/A | 12156 | 12171 | AGACAGTAACTGGTAG | 75 | 1890 |
| 959673 | N/A | N/A | 12199 | 12214 | TCCGTTAACCATCAAG | 95 | 1891 |
| 959683 | N/A | N/A | 12282 | 12297 | TTAGGTCTGGGTATAT | 94 | 1892 |
| 959693 | N/A | N/A | 12324 | 12339 | CCCCTGACTATATAAC | 0 | 1893 |
| 959703 | N/A | N/A | 12692 | 12707 | CTTGACCGTGTTTCCA | 97 | 1894 |
| 959713 | N/A | N/A | 12715 | 12730 | TTAAACTACCGAACGC | 95 | 1895 |
| 959723 | N/A | N/A | 12761 | 12776 | ATGGTAGAGTGGTAAG | 77 | 1896 |
| 959733 | N/A | N/A | 12832 | 12847 | ATTGCATAGCCTTCTT | 95 | 1897 |
| 959743 | N/A | N/A | 12884 | 12899 | CCAATCCTGTTAGACA | 83 | 1898 |
| 959753 | N/A | N/A | 12908 | 12923 | CTGCTTATAAAGCACA | 2 | 1899 |
| 959763 | N/A | N/A | 12935 | 12950 | ACAATAAGAGCTGTCT | 85 | 1900 |
| 959773 | N/A | N/A | 13372 | 13387 | TTTGCAGGCACCCCAG | 63 | 1901 |
| 959783 | N/A | N/A | 13396 | 13411 | TGAATGTCACCCTTCC | 53 | 1902 |
| 959793 | N/A | N/A | 13531 | 13546 | GCATCATTGGAAGACC | 86 | 1903 |
| 959803 | N/A | N/A | 13713 | 13728 | ACCAAGACCGCTAGTA | 38 | 1904 |
| 959813 | N/A | N/A | 13743 | 13758 | TGTTAGAACTAAGGCA | 79 | 1905 |
| 959823 | N/A | N/A | 13919 | 13934 | CCTGGAGTCATGACAT | 7 | 1906 |
| 959833 | N/A | N/A | 14304 | 14319 | TCTGAGCAGATAAATA | 39 | 1907 |
| 959843 | N/A | N/A | 14554 | 14569 | AAGTCTTAATGTGGAT | 84 | 1908 |
| 959853 | N/A | N/A | 14669 | 14684 | TTAGTGTCCCCATCCC | 78 | 1909 |
| 959863 | N/A | N/A | 15205 | 15220 | GAATATTGCCAGGTAT | 86 | 1910 |
| 959873 | N/A | N/A | 15766 | 15781 | TTAGTGTTGGTTTATA | 92 | 1911 |
| 959883 | N/A | N/A | 17198 | 17213 | TTTGACTTAGTCCGTG | 86 | 1912 |
| 959893 | N/A | N/A | 17226 | 17241 | CTCTGTAGCTGGTTTG | 82 | 1913 |
| 959903 | N/A | N/A | 17601 | 17616 | TTGATAGTGAATGTGT | 83 | 1914 |
| 959913 | N/A | N/A | 18397 | 18412 | ATATGTTTGGAAGTCG | 91 | 1915 |
| 959923 | N/A | N/A | 20291 | 20306 | CAATCAGAGGAAGCCC | 34 | 1916 |
| 959933 | N/A | N/A | 20516 | 20531 | TAACCAGATTGAGTCT | 66 | 1917 |
| 959943 | N/A | N/A | 20615 | 20630 | GTCTCTAATTTTACGA | 53 | 1918 |
| 959953 | N/A | N/A | 20664 | 20679 | ACAGCTTAGAAATTGC | 89 | 1919 |
| 959963 | N/A | N/A | 20843 | 20858 | CTGTATTAGCTCAATA | 67 | 1920 |
| 959973 | N/A | N/A | 20938 | 20953 | TCTTTGTAGCAGACAG | 84 | 1921 |
| 959983 | N/A | N/A | 21004 | 21019 | TTATTTTAACAGCTCA | 92 | 1922 |
| 959993 | N/A | N/A | 21410 | 21425 | CTGCAATTCTAGACAT | 29 | 1923 |
| 960003 | N/A | N/A | 21535 | 21550 | CATTTCAGAGTATAAG | 46 | 1924 |
| 960013 | N/A | N/A | 22708 | 22723 | GATGTGAGTGAAATAA | 69 | 1925 |
| 960023 | N/A | N/A | 22769 | 22784 | AAGGACATGACAGACT | 68 | 1926 |
| 960033 | N/A | N/A | 24043 | 24058 | CCACCATCAATGCTGC | 58 | 1927 |

TABLE 31
Inhibition of PNPLA3 mRNA by 3-10-3 cEt gapmers targeting SEQ ID NO: 1 and 2

| | SEQ | SEQ | SEQ | SEQ | | | |
|---|---|---|---|---|---|---|---|
| | ID | ID | ID | ID | | | |
| | NO: 1 | NO: 1 | NO: 2 | NO: 2 | | PNPLA3 | SEQ |
| Compound | Start | Stop | Start | Stop | | % | ID |
| Number | Site | Site | Site | Site | Sequence (5′ to 3′) | Inhibition | NO |
| 915609 | 705 | 720 | 11923 | 11938 | TGATGGTTGTTTTGGC | 99 | 702 |
| 959284 | 695 | 710 | 11913 | 11928 | TTTGGCATCAATGAAG | 69 | 1928 |
| 959294 | 817 | 832 | 12035 | 12050 | TAGAGGTTCCCTGTGC | 83 | 1929 |
| 959314 | 1091 | 1106 | 16211 | 16226 | GGGCAGGATGCTGAGA | 22 | 1930 |
| 959324 | 1606 | 1621 | 25369 | 25384 | ACTCACAGACTCTTCT | 68 | 1931 |
| 959334 | 1647 | 1662 | 25410 | 25425 | AGCACCTCTGAAAGAA | 67 | 1932 |
| 959344 | 1678 | 1693 | 25441 | 25456 | CGGAGGTAGCTGCACA | 85 | 1933 |
| 959354 | 1926 | 1941 | 25689 | 25704 | ATTCTAAGAACCTCAT | 51 | 1934 |
| 959384 | N/A | N/A | 4303 | 4318 | AAACAAACCCTCCGTC | 10 | 1935 |
| 959394 | N/A | N/A | 4734 | 4749 | AAATGATCATGTGGCG | 94 | 1936 |
| 959404 | N/A | N/A | 4768 | 4783 | CTGACTTTTATTGTTG | 74 | 1937 |
| 959414 | N/A | N/A | 4871 | 4886 | GTGAGTGTACTTTAGG | 98 | 1938 |
| 959424 | N/A | N/A | 5393 | 5408 | AATGCTATCAGGTGCA | 31 | 1939 |
| 959434 | N/A | N/A | 5579 | 5594 | TGCACAATGACATCAT | 88 | 1940 |
| 959444 | N/A | N/A | 5621 | 5636 | CTACCTGTGTCTTTTA | 90 | 1941 |
| 959454 | N/A | N/A | 5647 | 5662 | ATATATTGGGCTCAAT | 81 | 1942 |
| 959474 | N/A | N/A | 5867 | 5882 | ACTTTTGGCAAGGCCA | 17 | 1943 |
| 959484 | N/A | N/A | 7211 | 7226 | CCGCAAACAAGGTTAA | 22 | 1944 |
| 959684 | N/A | N/A | 12283 | 12298 | TTTAGGTCTGGGTATA | 93 | 1945 |
| 959694 | N/A | N/A | 12325 | 12340 | CCCCCTGACTATATAA | 18 | 1946 |
| 959704 | N/A | N/A | 12693 | 12708 | TCTTGACCGTGTTTCC | 97 | 1947 |
| 959734 | N/A | N/A | 12834 | 12849 | GCATTGCATAGCCTTC | 96 | 1948 |
| 959744 | N/A | N/A | 12886 | 12901 | AACCAATCCTGTTAGA | 59 | 1949 |
| 959754 | N/A | N/A | 12909 | 12924 | TCTGCTTATAAAGCAC | 100 | 1950 |
| 959774 | N/A | N/A | 13373 | 13388 | CTTTGCAGGCACCCCA | 72 | 1951 |
| 959784 | N/A | N/A | 13398 | 13413 | CTTGAATGTCACCCTT | 92 | 1952 |
| 959804 | N/A | N/A | 13715 | 13730 | TTACCAAGACCGCTAG | 47 | 1953 |
| 959824 | N/A | N/A | 14228 | 14243 | ACTTTTAGTATTAAAG | 0 | 1954 |
| 959844 | N/A | N/A | 14555 | 14570 | AAAGTCTTAATGTGGA | 88 | 1955 |
| 959854 | N/A | N/A | 14670 | 14685 | CTTAGTGTCCCCATCC | 76 | 1956 |
| 959874 | N/A | N/A | 15767 | 15782 | GTTAGTGTTGGTTTAT | 95 | 1957 |
| 959884 | N/A | N/A | 17199 | 17214 | GTTTGACTTAGTCCGT | 96 | 1958 |
| 959914 | N/A | N/A | 18398 | 18413 | AATATGTTTGGAAGTC | 87 | 1959 |
| 959934 | N/A | N/A | 20518 | 20533 | AGTAACCAGATTGAGT | 96 | 1960 |
| 959954 | N/A | N/A | 20665 | 20680 | CACAGCTTAGAAATTG | 88 | 1961 |
| 959964 | N/A | N/A | 20844 | 20859 | CCTGTATTAGCTCAAT | 92 | 1962 |
| 959974 | N/A | N/A | 20940 | 20955 | CCTCTTTGTAGCAGAC | 84 | 1963 |
| 959984 | N/A | N/A | 21006 | 21021 | GGTTATTTTAACAGCT | 85 | 1964 |
| 959994 | N/A | N/A | 21412 | 21427 | ACCTGCAATTCTAGAC | 61 | 1965 |
| 960014 | N/A | N/A | 22710 | 22725 | AAGATGTGAGTGAAAT | 70 | 1966 |
| 960024 | N/A | N/A | 22770 | 22785 | AAAGGACATGACAGAC | 87 | 1967 |

TABLE 32
Inhibition of PNPLA3 mRNA by 3-10-3 cEt gapmers targeting SEQ ID NO: 1 and 2

| | SEQ | SEQ | SEQ | SEQ | | | |
|---|---|---|---|---|---|---|---|
| | ID | ID | ID | ID | | | |
| | NO: 1 | NO: 1 | NO: 2 | NO: 2 | | PNPLA3 | SEQ |
| Compound | Start | Stop | Start | Stop | | % | ID |
| Number | Site | Site | Site | Site | Sequence (5′ to 3′) | Inhibition | NO |
| 959275 | 440 | 455 | 6014 | 6029 | GAGGAACTTGCTTAAG | 81 | 1968 |
| 959285 | 696 | 711 | 11914 | 11929 | TTTTGGCATCAATGAA | 62 | 1969 |
| 959305 | 1066 | 1081 | 16186 | 16201 | TCTAGCAGCTCATCTC | 64 | 1970 |
| 959335 | 1649 | 1664 | 25412 | 25427 | TTAGCACCTCTGAAAG | 72 | 1971 |
| 959345 | 1804 | 1819 | 25567 | 25582 | ATGTATTAGAGTTAAG | 77 | 1972 |
| 959355 | 1927 | 1942 | 25690 | 25705 | CATTCTAAGAACCTCA | 71 | 1973 |
| 959365 | 2183 | 2198 | 25946 | 25961 | TTAGTTAGGTGAAAAA | 81 | 1974 |
| 959375 | 2261 | 2276 | 26024 | 26039 | CACTGATTCACATAAT | 70 | 1975 |
| 959395 | N/A | N/A | 4737 | 4752 | TGCAAATGATCATGTG | 66 | 1976 |
| 959405 | N/A | N/A | 4769 | 4784 | GCTGACTTTTATTGTT | 84 | 1977 |
| 959415 | N/A | N/A | 4872 | 4887 | AGTGAGTGTACTTTAG | 94 | 1978 |
| 959425 | N/A | N/A | 5395 | 5410 | TTAATGCTATCAGGTG | 81 | 1979 |
| 959435 | N/A | N/A | 5580 | 5595 | ATGCACAATGACATCA | 86 | 1980 |
| 959445 | N/A | N/A | 5624 | 5639 | ATTCTACCTGTGTCTT | 97 | 1981 |
| 959455 | N/A | N/A | 5651 | 5666 | TTGGATATATTGGGCT | 97 | 1982 |
| 959475 | N/A | N/A | 5868 | 5883 | TACTTTTGGCAAGGCC | 70 | 1983 |
| 959485 | N/A | N/A | 7697 | 7712 | GCACAGAGTAGGTTAA | 72 | 1984 |
| 959655 | N/A | N/A | 12146 | 12161 | TGGTAGCTCCTGGCAA | 55 | 1985 |
| 959675 | N/A | N/A | 12201 | 12216 | TTTCCGTTAACCATCA | 94 | 1986 |
| 959695 | N/A | N/A | 12667 | 12682 | CATCTTAGTGGCTGGG | 93 | 1987 |
| 959705 | N/A | N/A | 12695 | 12710 | GTTCTTGACCGTGTTT | 97 | 1988 |
| 959715 | N/A | N/A | 12717 | 12732 | GGTTAAACTACCGAAC | 11 | 1989 |
| 959725 | N/A | N/A | 12783 | 12798 | CATGGTCTGCAAATTT | 89 | 1990 |
| 959745 | N/A | N/A | 12887 | 12902 | AAACCAATCCTGTTAG | 46 | 1991 |
| 959755 | N/A | N/A | 12910 | 12925 | ATCTGCTTATAAAGCA | 42 | 1992 |
| 959775 | N/A | N/A | 13374 | 13389 | ACTTTGCAGGCACCCC | 87 | 1993 |
| 959785 | N/A | N/A | 13399 | 13414 | GCTTGAATGTCACCCT | 94 | 1994 |
| 959805 | N/A | N/A | 13716 | 13731 | TTTACCAAGACCGCTA | 86 | 1995 |
| 959825 | N/A | N/A | 14230 | 14245 | CAACTTTTAGTATTAA | 0 | 1996 |
| 959835 | N/A | N/A | 14417 | 14432 | TCGACACAGCATCACC | 62 | 1997 |
| 959855 | N/A | N/A | 14671 | 14686 | TCTTAGTGTCCCCATC | 78 | 1998 |
| 959865 | N/A | N/A | 15209 | 15224 | TTAGGAATATTGCCAG | 93 | 1999 |
| 959875 | N/A | N/A | 15769 | 15784 | GGGTTAGTGTTGGTTT | 94 | 2000 |
| 959895 | N/A | N/A | 17288 | 17303 | TAGGGCACCTCAAGAA | 0 | 2001 |
| 959915 | N/A | N/A | 18400 | 18415 | CAAATATGTTTGGAAG | 50 | 2002 |
| 959925 | N/A | N/A | 20293 | 20308 | CCCAATCAGAGGAAGC | 41 | 2003 |
| 959935 | N/A | N/A | 20599 | 20614 | TCATCATTATTACCTG | 91 | 2004 |
| 959955 | N/A | N/A | 20803 | 20818 | TTCAGACCAGGGTAAT | 91 | 2005 |
| 959965 | N/A | N/A | 20845 | 20860 | GCCTGTATTAGCTCAA | 90 | 2006 |
| 959975 | N/A | N/A | 20941 | 20956 | GCCTCTTTGTAGCAGA | 0 | 2007 |
| 959995 | N/A | N/A | 21434 | 21449 | TACTGAGAGGAAATGA | 64 | 2008 |
| 960015 | N/A | N/A | 22714 | 22729 | TGTAAAGATGTGAGTG | 78 | 2009 |
| 960025 | N/A | N/A | 22772 | 22787 | TCAAAGGACATGACAG | 80 | 2010 |
| 960037 | N/A | N/A | 22590 | 22605 | GAGCAACGAGGAAGGA | 68 | 2011 |

TABLE 33
Inhibition of PNPLA3 mRNA by 3-10-3 cEt gapmers targeting SEQ ID NO: 1 and 2

| | SEQ | SEQ | SEQ | SEQ | | | |
|---|---|---|---|---|---|---|---|
| | ID | ID | ID | ID | | | |
| | NO: 1 | NO: 1 | NO: 2 | NO: 2 | | PNPLA3 | SEQ |
| Compound | Start | Stop | Start | Stop | | % | ID |
| Number | Site | Site | Site | Site | Sequence (5′ to 3′) | Inhibition | NO |
| 915609 | 705 | 720 | 11923 | 11938 | TGATGGTTGTTTTGGC | 98 | 702 |
| 959276 | 447 | 462 | 6021 | 6036 | CCTGTCGGAGGAACTT | 37 | 2012 |
| 959286 | 699 | 714 | 11917 | 11932 | TTGTTTTGGCATCAAT | 73 | 2013 |
| 959296 | 895 | 910 | 13631 | 13646 | AATGCATCCAAATATC | 0 | 2014 |
| 959306 | 1069 | 1084 | 16189 | 16204 | TGGTCTAGCAGCTCAT | 25 | 2015 |
| 959316 | 1221 | 1236 | 19061 | 19076 | TTACATAAGACATTAT | 35 | 2016 |
| 959326 | 1614 | 1629 | 25377 | 25392 | CTCAAGTGACTCACAG | 85 | 2017 |
| 959336 | 1650 | 1665 | 25413 | 25428 | TTTAGCACCTCTGAAA | 24 | 2018 |
| 959346 | 1834 | 1849 | 25597 | 25612 | TTTCCCAACCAGCTGA | 60 | 2019 |
| 959356 | 2096 | 2111 | 25859 | 25874 | TCATCTTTGCAGACCA | 90 | 2020 |
| 959366 | 2184 | 2199 | 25947 | 25962 | TTTAGTTAGGTGAAAA | 57 | 2021 |
| 959376 | 2262 | 2277 | 26025 | 26040 | TCACTGATTCACATAA | 86 | 2022 |
| 959386 | N/A | N/A | 4306 | 4321 | GAGAAACAAACCCTCC | 0 | 2023 |
| 959396 | N/A | N/A | 4738 | 4753 | GTGCAAATGATCATGT | 69 | 2024 |
| 959406 | N/A | N/A | 4771 | 4786 | AAGCTGACTTTTATTG | 57 | 2025 |
| 959416 | N/A | N/A | 5276 | 5291 | TCTTGGGATGCACAGG | 49 | 2026 |
| 959426 | N/A | N/A | 5397 | 5412 | CCTTAATGCTATCAGG | 0 | 2027 |
| 959436 | N/A | N/A | 5581 | 5596 | AATGCACAATGACATC | 69 | 2028 |
| 959446 | N/A | N/A | 5625 | 5640 | AATTCTACCTGTGTCT | 82 | 2029 |
| 959456 | N/A | N/A | 5652 | 5667 | TTTGGATATATTGGGC | 95 | 2030 |
| 959466 | N/A | N/A | 5802 | 5817 | CTACTATGGGAGCCAC | 64 | 2031 |
| 959476 | N/A | N/A | 5871 | 5886 | TAATACTTTTGGCAAG | 29 | 2032 |
| 959486 | N/A | N/A | 7784 | 7799 | TTATAGGCGAGAGCAC | 0 | 2033 |
| 959656 | N/A | N/A | 12147 | 12162 | CTGGTAGCTCCTGGCA | 44 | 2034 |
| 959666 | N/A | N/A | 12164 | 12179 | GATTGTGCAGACAGTA | 95 | 2035 |
| 959676 | N/A | N/A | 12202 | 12217 | ATTTCCGTTAACCATC | 93 | 2036 |
| 959686 | N/A | N/A | 12288 | 12303 | TGAGTTTTAGGTCTGG | 96 | 2037 |
| 959696 | N/A | N/A | 12669 | 12684 | ATCATCTTAGTGGCTG | 91 | 2038 |
| 959706 | N/A | N/A | 12696 | 12711 | TGTTCTTGACCGTGTT | 98 | 2039 |
| 959716 | N/A | N/A | 12719 | 12734 | AAGGTTAAACTACCGA | 6 | 2040 |
| 959726 | N/A | N/A | 12785 | 12800 | TACATGGTCTGCAAAT | 90 | 2041 |
| 959736 | N/A | N/A | 12838 | 12853 | CATTGCATTGCATAGC | 96 | 2042 |
| 959746 | N/A | N/A | 12888 | 12903 | AAAACCAATCCTGTTA | 47 | 2043 |
| 959756 | N/A | N/A | 12911 | 12926 | CATCTGCTTATAAAGC | 81 | 2044 |
| 959766 | N/A | N/A | 12967 | 12982 | AAACTTTGCAGCCTAT | 93 | 2045 |
| 959776 | N/A | N/A | 13376 | 13391 | AGACTTTGCAGGCACC | 90 | 2046 |
| 959786 | N/A | N/A | 13400 | 13415 | GGCTTGAATGTCACCC | 69 | 2047 |
| 959796 | N/A | N/A | 13697 | 13712 | AATGCTTGTCAAAAGG | 70 | 2048 |
| 959806 | N/A | N/A | 13717 | 13732 | CTTTACCAAGACCGCT | 82 | 2049 |
| 959816 | N/A | N/A | 13747 | 13762 | TAAGTGTTAGAACTAA | 30 | 2050 |
| 959826 | N/A | N/A | 14232 | 14247 | ACCAACTTTTAGTATT | 79 | 2051 |
| 959836 | N/A | N/A | 14419 | 14434 | CATCGACACAGCATCA | 59 | 2052 |
| 959846 | N/A | N/A | 14557 | 14572 | CCAAAGTCTTAATGTG | 53 | 2053 |
| 959856 | N/A | N/A | 14676 | 14691 | CCATCTCTTAGTGTCC | 88 | 2054 |
| 959866 | N/A | N/A | 15210 | 15225 | CTTAGGAATATTGCCA | 87 | 2055 |
| 959876 | N/A | N/A | 15770 | 15785 | AGGGTTAGTGTTGGTT | 89 | 2056 |
| 959886 | N/A | N/A | 17202 | 17217 | TCTGTTTGACTTAGTC | 70 | 2057 |
| 959896 | N/A | N/A | 17290 | 17305 | CTTAGGGCACCTCAAG | 30 | 2058 |
| 959906 | N/A | N/A | 17735 | 17750 | TAATCTGGTCATATGG | 43 | 2059 |
| 959916 | N/A | N/A | 18445 | 18460 | TGCTTACGGAGCATAG | 0 | 2060 |
| 959926 | N/A | N/A | 20472 | 20487 | CTCTAGACGGGAAGCT | 31 | 2061 |
| 959936 | N/A | N/A | 20601 | 20616 | GATCATCATTATTACC | 71 | 2062 |
| 959946 | N/A | N/A | 20652 | 20667 | TTGCAGTGCCCTGGCC | 31 | 2063 |
| 959956 | N/A | N/A | 20804 | 20819 | ATTCAGACCAGGGTAA | 87 | 2064 |
| 959966 | N/A | N/A | 20847 | 20862 | ATGCCTGTATTAGCTC | 65 | 2065 |
| 959976 | N/A | N/A | 20942 | 20957 | AGCCTCTTTGTAGCAG | 5 | 2066 |
| 959986 | N/A | N/A | 21008 | 21023 | GAGGTTATTTTAACAG | 69 | 2067 |
| 959996 | N/A | N/A | 21435 | 21450 | ATACTGAGAGGAAATG | 68 | 2068 |
| 960006 | N/A | N/A | 21539 | 21554 | ATGACATTTCAGAGTA | 88 | 2069 |
| 960016 | N/A | N/A | 22715 | 22730 | GTGTAAAGATGTGAGT | 84 | 2070 |
| 960026 | N/A | N/A | 24033 | 24048 | TGCTGCACTCAAAGAG | 0 | 2071 |
| 960038 | N/A | N/A | 19377 | 19392 | TCACAAGAGACTGGAC | 31 | 2072 |

TABLE 34
Inhibition of PNPLA3 mRNA by 3-10-3 cEt gapmers targeting SEQ ID NO: 1 and 2

| | SEQ | SEQ | SEQ | SEQ | | | |
|---|---|---|---|---|---|---|---|
| | ID | ID | ID | ID | | | |
| | NO: 1 | NO: 1 | NO: 2 | NO: 2 | | PNPLA3 | SEQ |
| Compound | Start | Stop | Start | Stop | | % | ID |
| Number | Site | Site | Site | Site | Sequence (5′ to 3′) | Inhibition | NO |
| 915609 | 705 | 720 | 11923 | 11938 | TGATGGTTGTTTTGGC | 98 | 702 |
| 959277 | 481 | 496 | 6055 | 6070 | TGGTGGACATTGGCCG | 5 | 2073 |
| 959287 | 707 | 722 | 11925 | 11940 | GGTGATGGTTGTTTTG | 85 | 2074 |
| 959297 | 896 | 911 | 13632 | 13647 | GAATGCATCCAAATAT | 0 | 2075 |
| 959307 | 1070 | 1085 | 16190 | 16205 | GTGGTCTAGCAGCTCA | 66 | 2076 |
| 959317 | 1223 | 1238 | 19063 | 19078 | CATTACATAAGACATT | 46 | 2077 |
| 959327 | 1615 | 1630 | 25378 | 25393 | CCTCAAGTGACTCACA | 83 | 2078 |
| 959337 | 1651 | 1666 | 25414 | 25429 | CTTTAGCACCTCTGAA | 71 | 2079 |
| 959347 | 1835 | 1850 | 25598 | 25613 | ATTTCCCAACCAGCTG | 49 | 2080 |
| 959357 | 2099 | 2114 | 25862 | 25877 | TTATCATCTTTGCAGA | 48 | 2081 |
| 959367 | 2185 | 2200 | 25948 | 25963 | TTTTAGTTAGGTGAAA | 43 | 2082 |
| 959377 | 2263 | 2278 | 26026 | 26041 | CTCACTGATTCACATA | 79 | 2083 |
| 959387 | N/A | N/A | 4307 | 4322 | TGAGAAACAAACCCTC | 0 | 2084 |
| 959397 | N/A | N/A | 4739 | 4754 | TGTGCAAATGATCATG | 82 | 2085 |
| 959407 | N/A | N/A | 4859 | 4874 | TAGGCTCCTGGGACCT | 0 | 2086 |
| 959417 | N/A | N/A | 5277 | 5292 | ATCTTGGGATGCACAG | 89 | 2087 |
| 959427 | N/A | N/A | 5567 | 5582 | TCATGGCTTCCAGTGT | 78 | 2088 |
| 959437 | N/A | N/A | 5600 | 5615 | TTCAATGTGGCTTCTA | 96 | 2089 |
| 959447 | N/A | N/A | 5627 | 5642 | TTAATTCTACCTGTGT | 72 | 2090 |
| 959457 | N/A | N/A | 5706 | 5721 | TGAAATATCTCATTAG | 77 | 2091 |
| 959467 | N/A | N/A | 5805 | 5820 | TGTCTACTATGGGAGC | 83 | 2092 |
| 959477 | N/A | N/A | 5875 | 5890 | ATGGTAATACTTTTGG | 75 | 2093 |
| 959657 | N/A | N/A | 12148 | 12163 | ACTGGTAGCTCCTGGC | 78 | 2094 |
| 959667 | N/A | N/A | 12165 | 12180 | TGATTGTGCAGACAGT | 97 | 2095 |
| 959677 | N/A | N/A | 12203 | 12218 | TATTTCCGTTAACCAT | 91 | 2096 |
| 959687 | N/A | N/A | 12289 | 12304 | CTGAGTTTTAGGTCTG | 96 | 2097 |
| 959697 | N/A | N/A | 12671 | 12686 | GAATCATCTTAGTGGC | 94 | 2098 |
| 959707 | N/A | N/A | 12697 | 12712 | TTGTTCTTGACCGTGT | 98 | 2099 |
| 959717 | N/A | N/A | 12753 | 12768 | GTGGTAAGGCATACTA | 35 | 2100 |
| 959727 | N/A | N/A | 12789 | 12804 | GGTGTACATGGTCTGC | 97 | 2101 |
| 959737 | N/A | N/A | 12839 | 12854 | GCATTGCATTGCATAG | 92 | 2102 |
| 959747 | N/A | N/A | 12890 | 12905 | GGAAAACCAATCCTGT | 69 | 2103 |
| 959757 | N/A | N/A | 12927 | 12942 | AGCTGTCTCCTCTACT | 70 | 2104 |
| 959767 | N/A | N/A | 12968 | 12983 | CAAACTTTGCAGCCTA | 95 | 2105 |
| 959777 | N/A | N/A | 13377 | 13392 | GAGACTTTGCAGGCAC | 88 | 2106 |
| 959787 | N/A | N/A | 13402 | 13417 | TCGGCTTGAATGTCAC | 67 | 2107 |
| 959797 | N/A | N/A | 13700 | 13715 | GTAAATGCTTGTCAAA | 91 | 2108 |
| 959807 | N/A | N/A | 13720 | 13735 | AGTCTTTACCAAGACC | 0 | 2109 |
| 959817 | N/A | N/A | 13911 | 13926 | CATGACATCCCAGTTC | 29 | 2110 |
| 959827 | N/A | N/A | 14233 | 14248 | AACCAACTTTTAGTAT | 27 | 2111 |
| 959837 | N/A | N/A | 14420 | 14435 | CCATCGACACAGCATC | 89 | 2112 |
| 959847 | N/A | N/A | 14567 | 14582 | CTACTTATCCCCAAAG | 16 | 2113 |
| 959857 | N/A | N/A | 14677 | 14692 | GCCATCTCTTAGTGTC | 36 | 2114 |
| 959867 | N/A | N/A | 15211 | 15226 | CCTTAGGAATATTGCC | 75 | 2115 |
| 959877 | N/A | N/A | 15771 | 15786 | GAGGGTTAGTGTTGGT | 93 | 2116 |
| 959887 | N/A | N/A | 17218 | 17233 | CTGGTTTGTGGGTTCT | 75 | 2117 |
| 959897 | N/A | N/A | 17291 | 17306 | TCTTAGGGCACCTCAA | 53 | 2118 |
| 959907 | N/A | N/A | 17736 | 17751 | TTAATCTGGTCATATG | 0 | 2119 |
| 959917 | N/A | N/A | 18852 | 18867 | ACAAAAGCGACAAGGT | 33 | 2120 |
| 959927 | N/A | N/A | 20508 | 20523 | TTGAGTCTCCTGACCA | 65 | 2121 |
| 959937 | N/A | N/A | 20602 | 20617 | CGATCATCATTATTAC | 87 | 2122 |
| 959947 | N/A | N/A | 20653 | 20668 | ATTGCAGTGCCCTGGC | 69 | 2123 |
| 959957 | N/A | N/A | 20805 | 20820 | TATTCAGACCAGGGTA | 89 | 2124 |
| 959967 | N/A | N/A | 20848 | 20863 | GATGCCTGTATTAGCT | 72 | 2125 |
| 959977 | N/A | N/A | 20944 | 20959 | GCAGCCTCTTTGTAGC | 0 | 2126 |
| 959987 | N/A | N/A | 21010 | 21025 | CTGAGGTTATTTTAAC | 40 | 2127 |
| 959997 | N/A | N/A | 21436 | 21451 | TATACTGAGAGGAAAT | 47 | 2128 |
| 960007 | N/A | N/A | 21541 | 21556 | ATATGACATTTCAGAG | 91 | 2129 |
| 960017 | N/A | N/A | 22716 | 22731 | CGTGTAAAGATGTGAG | 87 | 2130 |
| 960027 | N/A | N/A | 24035 | 24050 | AATGCTGCACTCAAAG | 31 | 2131 |
| 960039 | N/A | N/A | 20215 | 20230 | TAACAAACTATGCCTA | 44 | 2132 |

TABLE 35
Inhibition of PNPLA3 mRNA by 3-10-3 cEt gapmers targeting SEQ ID NO: 1 and 2

| | SEQ | SEQ | SEQ | SEQ | | | |
|---|---|---|---|---|---|---|---|
| | ID | ID | ID | ID | | | |
| | NO: 1 | NO: 1 | NO: 2 | NO: 2 | | PNPLA3 | SEQ |
| Compound | Start | Stop | Start | Stop | | % | ID |
| Number | Site | Site | Site | Site | Sequence (5′ to 3′) | Inhibition | NO |
| 915609 | 705 | 720 | 11923 | 11938 | TGATGGTTGTTTTGGC | 98 | 702 |
| 959274 | 439 | 454 | 6013 | 6028 | AGGAACTTGCTTAAGT | 73 | 2133 |
| 959284 | 695 | 710 | 11913 | 11928 | TTTGGCATCAATGAAG | 60 | 1928 |
| 959294 | 817 | 832 | 12035 | 12050 | TAGAGGTTCCCTGTGC | 77 | 1929 |
| 959304 | 1063 | 1078 | 16183 | 16198 | AGCAGCTCATCTCCCT | 62 | 2134 |
| 959314 | 1091 | 1106 | 16211 | 16226 | GGGCAGGATGCTGAGA | 13 | 1930 |
| 959324 | 1606 | 1621 | 25369 | 25384 | ACTCACAGACTCTTCT | 72 | 1931 |
| 959334 | 1647 | 1662 | 25410 | 25425 | AGCACCTCTGAAAGAA | 65 | 1932 |
| 959344 | 1678 | 1693 | 25441 | 25456 | CGGAGGTAGCTGCACA | 86 | 1933 |
| 959354 | 1926 | 1941 | 25689 | 25704 | ATTCTAAGAACCTCAT | 54 | 1934 |
| 959364 | 2181 | 2196 | 25944 | 25959 | AGTTAGGTGAAAAAGG | 92 | 2135 |
| 959374 | 2260 | 2275 | 26023 | 26038 | ACTGATTCACATAATA | 78 | 2136 |
| 959384 | N/A | N/A | 4303 | 4318 | AAACAAACCCTCCGTC | 2 | 1935 |
| 959394 | N/A | N/A | 4734 | 4749 | AAATGATCATGTGGCG | 94 | 1936 |
| 959404 | N/A | N/A | 4768 | 4783 | CTGACTTTTATTGTTG | 72 | 1937 |
| 959414 | N/A | N/A | 4871 | 4886 | GTGAGTGTACTTTAGG | 97 | 1938 |
| 959424 | N/A | N/A | 5393 | 5408 | AATGCTATCAGGTGCA | 31 | 1939 |
| 959434 | N/A | N/A | 5579 | 5594 | TGCACAATGACATCAT | 87 | 1940 |
| 959444 | N/A | N/A | 5621 | 5636 | CTACCTGTGTCTTTTA | 90 | 1941 |
| 959454 | N/A | N/A | 5647 | 5662 | ATATATTGGGCTCAAT | 80 | 1942 |
| 959464 | N/A | N/A | 5799 | 5814 | CTATGGGAGCCACATG | 24 | 2137 |
| 959474 | N/A | N/A | 5867 | 5882 | ACTTTTGGCAAGGCCA | 23 | 1943 |
| 959484 | N/A | N/A | 7211 | 7226 | CCGCAAACAAGGTTAA | 0 | 1944 |
| 959664 | N/A | N/A | 12157 | 12172 | CAGACAGTAACTGGTA | 96 | 2138 |
| 959674 | N/A | N/A | 12200 | 12215 | TTCCGTTAACCATCAA | 97 | 2139 |
| 959684 | N/A | N/A | 12283 | 12298 | TTTAGGTCTGGGTATA | 93 | 1945 |
| 959694 | N/A | N/A | 12325 | 12340 | CCCCCTGACTATATAA | 26 | 1946 |
| 959704 | N/A | N/A | 12693 | 12708 | TCTTGACCGTGTTTCC | 98 | 1947 |
| 959714 | N/A | N/A | 12716 | 12731 | GTTAAACTACCGAACG | 35 | 2140 |
| 959724 | N/A | N/A | 12763 | 12778 | CTATGGTAGAGTGGTA | 93 | 2141 |
| 959734 | N/A | N/A | 12834 | 12849 | GCATTGCATAGCCTTC | 97 | 1948 |
| 959744 | N/A | N/A | 12886 | 12901 | AACCAATCCTGTTAGA | 55 | 1949 |
| 959754 | N/A | N/A | 12909 | 12924 | TCTGCTTATAAAGCAC | 0 | 1950 |
| 959764 | N/A | N/A | 12937 | 12952 | GGACAATAAGAGCTGT | 91 | 2142 |
| 959774 | N/A | N/A | 13373 | 13388 | CTTTGCAGGCACCCCA | 72 | 1951 |
| 959784 | N/A | N/A | 13398 | 13413 | CTTGAATGTCACCCTT | 92 | 1952 |
| 959794 | N/A | N/A | 13532 | 13547 | AGCATCATTGGAAGAC | 92 | 2143 |
| 959804 | N/A | N/A | 13715 | 13730 | TTACCAAGACCGCTAG | 57 | 1953 |
| 959814 | N/A | N/A | 13744 | 13759 | GTGTTAGAACTAAGGC | 94 | 2144 |
| 959824 | N/A | N/A | 14228 | 14243 | ACTTTTAGTATTAAAG | 0 | 1954 |
| 959834 | N/A | N/A | 14306 | 14321 | TTTCTGAGCAGATAAA | 66 | 2145 |
| 959844 | N/A | N/A | 14555 | 14570 | AAAGTCTTAATGTGGA | 87 | 1955 |
| 959854 | N/A | N/A | 14670 | 14685 | CTTAGTGTCCCCATCC | 77 | 1956 |
| 959864 | N/A | N/A | 15208 | 15223 | TAGGAATATTGCCAGG | 89 | 2146 |
| 959874 | N/A | N/A | 15767 | 15782 | GTTAGTGTTGGTTTAT | 94 | 1957 |
| 959884 | N/A | N/A | 17199 | 17214 | GTTTGACTTAGTCCGT | 95 | 1958 |
| 959894 | N/A | N/A | 17228 | 17243 | AACTCTGTAGCTGGTT | 41 | 2147 |
| 959904 | N/A | N/A | 17603 | 17618 | TCTTGATAGTGAATGT | 73 | 2148 |
| 959914 | N/A | N/A | 18398 | 18413 | AATATGTTTGGAAGTC | 89 | 1959 |
| 959924 | N/A | N/A | 20292 | 20307 | CCAATCAGAGGAAGCC | 58 | 2149 |
| 959934 | N/A | N/A | 20518 | 20533 | AGTAACCAGATTGAGT | 81 | 1960 |
| 959944 | N/A | N/A | 20617 | 20632 | CTGTCTCTAATTTTAC | 75 | 2150 |
| 959954 | N/A | N/A | 20665 | 20680 | CACAGCTTAGAAATTG | 87 | 1961 |
| 959964 | N/A | N/A | 20844 | 20859 | CCTGTATTAGCTCAAT | 92 | 1962 |
| 959974 | N/A | N/A | 20940 | 20955 | CCTCTTTGTAGCAGAC | 83 | 1963 |
| 959984 | N/A | N/A | 21006 | 21021 | GGTTATTTTAACAGCT | 85 | 1964 |
| 959994 | N/A | N/A | 21412 | 21427 | ACCTGCAATTCTAGAC | 54 | 1965 |
| 960004 | N/A | N/A | 21537 | 21552 | GACATTTCAGAGTATA | 93 | 2151 |
| 960014 | N/A | N/A | 22710 | 22725 | AAGATGTGAGTGAAAT | 69 | 1966 |
| 960024 | N/A | N/A | 22770 | 22785 | AAAGGACATGACAGAC | 75 | 1967 |
| 960034 | N/A | N/A | 24613 | 24628 | GCAAATCGGATCTTTG | 32 | 2152 |

TABLE 36
Inhibition of PNPLA3 mRNA by 3-10-3 cEt gapmers targeting SEQ ID NO: 1 and 2

| | SEQ | SEQ | SEQ | SEQ | | | |
|---|---|---|---|---|---|---|---|
| | ID | ID | ID | ID | | | |
| | NO: 1 | NO: 1 | NO: 2 | NO: 2 | | PNPLA3 | SEQ |
| Compound | Start | Stop | Start | Stop | | % | ID |
| Number | Site | Site | Site | Site | Sequence (5′ to 3′) | Inhibition | NO |
| 915609 | 705 | 720 | 11923 | 11938 | TGATGGTTGTTTTGGC | 98 | 702 |
| 959275 | 440 | 455 | 6014 | 6029 | GAGGAACTTGCTTAAG | 80 | 1968 |
| 959285 | 696 | 711 | 11914 | 11929 | TTTTGGCATCAATGAA | 63 | 1969 |
| 959295 | 823 | 838 | 12041 | 12056 | AGAAGGTAGAGGTTCC | 48 | 2153 |
| 959305 | 1066 | 1081 | 16186 | 16201 | TCTAGCAGCTCATCTC | 66 | 1970 |
| 959315 | 1093 | 1108 | 16213 | 16228 | CAGGGCAGGATGCTGA | 2 | 2154 |
| 959325 | 1608 | 1623 | 25371 | 25386 | TGACTCACAGACTCTT | 60 | 2155 |
| 959335 | 1649 | 1664 | 25412 | 25427 | TTAGCACCTCTGAAAG | 54 | 1971 |
| 959345 | 1804 | 1819 | 25567 | 25582 | ATGTATTAGAGTTAAG | 79 | 1972 |
| 959355 | 1927 | 1942 | 25690 | 25705 | CATTCTAAGAACCTCA | 68 | 1973 |
| 959365 | 2183 | 2198 | 25946 | 25961 | TTAGTTAGGTGAAAAA | 69 | 1974 |
| 959375 | 2261 | 2276 | 26024 | 26039 | CACTGATTCACATAAT | 73 | 1975 |
| 959385 | N/A | N/A | 4305 | 4320 | AGAAACAAACCCTCCG | 70 | 2156 |
| 959395 | N/A | N/A | 4737 | 4752 | TGCAAATGATCATGTG | 69 | 1976 |
| 959405 | N/A | N/A | 4769 | 4784 | GCTGACTTTTATTGTT | 83 | 1977 |
| 959415 | N/A | N/A | 4872 | 4887 | AGTGAGTGTACTTTAG | 94 | 1978 |
| 959425 | N/A | N/A | 5395 | 5410 | TTAATGCTATCAGGTG | 82 | 1979 |
| 959435 | N/A | N/A | 5580 | 5595 | ATGCACAATGACATCA | 84 | 1980 |
| 959445 | N/A | N/A | 5624 | 5639 | ATTCTACCTGTGTCTT | 95 | 1981 |
| 959455 | N/A | N/A | 5651 | 5666 | TTGGATATATTGGGCT | 97 | 1982 |
| 959465 | N/A | N/A | 5800 | 5815 | ACTATGGGAGCCACAT | 26 | 2157 |
| 959475 | N/A | N/A | 5868 | 5883 | TACTTTTGGCAAGGCC | 69 | 1983 |
| 959485 | N/A | N/A | 7697 | 7712 | GCACAGAGTAGGTTAA | 70 | 1984 |
| 959655 | N/A | N/A | 12146 | 12161 | TGGTAGCTCCTGGCAA | 50 | 1985 |
| 959665 | N/A | N/A | 12162 | 12177 | TTGTGCAGACAGTAAC | 87 | 2158 |
| 959675 | N/A | N/A | 12201 | 12216 | TTTCCGTTAACCATCA | 95 | 1986 |
| 959685 | N/A | N/A | 12284 | 12299 | TTTTAGGTCTGGGTAT | 81 | 2159 |
| 959695 | N/A | N/A | 12667 | 12682 | CATCTTAGTGGCTGGG | 91 | 1987 |
| 959705 | N/A | N/A | 12695 | 12710 | GTTCTTGACCGTGTTT | 97 | 1988 |
| 959715 | N/A | N/A | 12717 | 12732 | GGTTAAACTACCGAAC | 26 | 1989 |
| 959725 | N/A | N/A | 12783 | 12798 | CATGGTCTGCAAATTT | 89 | 1990 |
| 959735 | N/A | N/A | 12837 | 12852 | ATTGCATTGCATAGCC | 95 | 2160 |
| 959745 | N/A | N/A | 12887 | 12902 | AAACCAATCCTGTTAG | 54 | 1991 |
| 959755 | N/A | N/A | 12910 | 12925 | ATCTGCTTATAAAGCA | 43 | 1992 |
| 959765 | N/A | N/A | 12964 | 12979 | CTTTGCAGCCTATCCC | 95 | 2161 |
| 959775 | N/A | N/A | 13374 | 13389 | ACTTTGCAGGCACCCC | 86 | 1993 |
| 959785 | N/A | N/A | 13399 | 13414 | GCTTGAATGTCACCCT | 95 | 1994 |
| 959795 | N/A | N/A | 13534 | 13549 | TCAGCATCATTGGAAG | 60 | 2162 |
| 959805 | N/A | N/A | 13716 | 13731 | TTTACCAAGACCGCTA | 82 | 1995 |
| 959815 | N/A | N/A | 13745 | 13760 | AGTGTTAGAACTAAGG | 93 | 2163 |
| 959825 | N/A | N/A | 14230 | 14245 | CAACTTTTAGTATTAA | 9 | 1996 |
| 959835 | N/A | N/A | 14417 | 14432 | TCGACACAGCATCACC | 59 | 1997 |
| 959845 | N/A | N/A | 14556 | 14571 | CAAAGTCTTAATGTGG | 84 | 2164 |
| 959855 | N/A | N/A | 14671 | 14686 | TCTTAGTGTCCCCATC | 78 | 1998 |
| 959865 | N/A | N/A | 15209 | 15224 | TTAGGAATATTGCCAG | 91 | 1999 |
| 959875 | N/A | N/A | 15769 | 15784 | GGGTTAGTGTTGGTTT | 93 | 2000 |
| 959885 | N/A | N/A | 17200 | 17215 | TGTTTGACTTAGTCCG | 96 | 2165 |
| 959895 | N/A | N/A | 17288 | 17303 | TAGGGCACCTCAAGAA | 0 | 2001 |
| 959905 | N/A | N/A | 17734 | 17749 | AATCTGGTCATATGGT | 42 | 2166 |
| 959915 | N/A | N/A | 18400 | 18415 | CAAATATGTTTGGAAG | 55 | 2002 |
| 959925 | N/A | N/A | 20293 | 20308 | CCCAATCAGAGGAAGC | 57 | 2003 |
| 959935 | N/A | N/A | 20599 | 20614 | TCATCATTATTACCTG | 93 | 2004 |
| 959945 | N/A | N/A | 20651 | 20666 | TGCAGTGCCCTGGCCT | 40 | 2167 |
| 959955 | N/A | N/A | 20803 | 20818 | TTCAGACCAGGGTAAT | 93 | 2005 |
| 959965 | N/A | N/A | 20845 | 20860 | GCCTGTATTAGCTCAA | 88 | 2006 |
| 959975 | N/A | N/A | 20941 | 20956 | GCCTCTTTGTAGCAGA | 0 | 2007 |
| 959985 | N/A | N/A | 21007 | 21022 | AGGTTATTTTAACAGC | 94 | 2168 |
| 959995 | N/A | N/A | 21434 | 21449 | TACTGAGAGGAAATGA | 65 | 2008 |
| 960005 | N/A | N/A | 21538 | 21553 | TGACATTTCAGAGTAT | 87 | 2169 |
| 960015 | N/A | N/A | 22714 | 22729 | TGTAAAGATGTGAGTG | 75 | 2009 |
| 960025 | N/A | N/A | 22772 | 22787 | TCAAAGGACATGACAG | 78 | 2010 |
| 960037 | N/A | N/A | 22590 | 22605 | GAGCAACGAGGAAGGA | 64 | 2011 |

### Example 2: Dose-Dependent Antisense Inhibition of Human PNPLA3 in A431 Cells

[0359] Gapmers from Example 1 exhibiting significant in vitro inhibition of PNPLA3 mRNA were selected and tested at various doses in A431 cells. The antisense oligonucleotides were tested in a series of experiments that had similar culture conditions. The results for each experiment are presented in separate tables shown below. Cells were plated at a density of 10,000 cells per well and transfected free uptake with different concentrations of antisense oligonucleotide, as specified in the Tables below. After a treatment period of approximately 16 hours, RNA was isolated from the cells and PNPLA3 mRNA levels were measured by quantitative real-time PCR. Human primer probe set RTS36070 was used to measure mRNA levels. PNPLA3 mRNA levels were adjusted according to total RNA content, as measured by RIBOGREEN®. Results are presented as percent inhibition of PNPLA3, relative to untreated control cells.

[0360] The half maximal inhibitory concentration (IC₅₀) of each oligonucleotide is also presented. PNPLA3 mRNA levels were significantly reduced in a dose-dependent manner in antisense oligonucleotide treated cells.

TABLE 37
Multi-dose assay of 3-10-3 cEt gapmers in A431 cells

| | PNPLA3 % Inhibition | | | | |
|---|---|---|---|---|---|
| Compound | 62.5 | 250 | 1,000 | 4,000 | IC₅₀ |
| Number | nM | nM | nM | nM | (μM) |
| 912712 | 27 | 67 | 76 | 74 | 0.2 |
| 912732 | 54 | 78 | 88 | 87 | <0.1 |
| 912733 | 45 | 74 | 85 | 88 | <0.1 |
| 912734 | 33 | 64 | 80 | 83 | 0.1 |
| 912756 | 46 | 72 | 89 | 92 | <0.1 |
| 912757 | 31 | 62 | 78 | 86 | 0.2 |
| 912758 | 38 | 70 | 85 | 90 | 0.1 |
| 912759 | 66 | 92 | 97 | 98 | <0.1 |
| 912772 | 46 | 63 | 79 | 88 | 0.1 |
| 912795 | 40 | 64 | 83 | 84 | 0.1 |
| 912812 | 43 | 81 | 88 | 88 | <0.1 |
| 912822 | 81 | 83 | 92 | 86 | <0.1 |
| 912823 | 67 | 80 | 91 | 86 | <0.1 |
| 912825 | 58 | 80 | 86 | 88 | <0.1 |
| 912834 | 37 | 75 | 81 | 84 | 0.1 |
| 912841 | 17 | 62 | 79 | 69 | 0.3 |
| 912847 | 70 | 83 | 90 | 91 | <0.1 |
| 912848 | 80 | 89 | 90 | 90 | <0.1 |
| 912855 | 48 | 62 | 77 | 80 | 0.1 |

TABLE 38
Multi-dose assay of 3-10-3 cEt gapmers in A431 cells

| | PNPLA3 % Inhibition | | | | |
|---|---|---|---|---|---|
| Compound | 62.5 | 250 | 1,000 | 4,000 | IC₅₀ |
| Number | nM | nM | nM | nM | (μM) |
| 912759 | 68 | 94 | 94 | 98 | <0.1 |
| 912813 | 57 | 84 | 90 | 87 | <0.1 |
| 912856 | 60 | 81 | 91 | 88 | <0.1 |
| 912859 | 48 | 79 | 81 | 72 | <0.1 |
| 912864 | 60 | 88 | 90 | 90 | <0.1 |
| 912870 | 67 | 81 | 91 | 94 | <0.1 |
| 912871 | 21 | 67 | 84 | 89 | 0.2 |
| 912872 | 18 | 73 | 90 | 92 | 0.2 |
| 912876 | 43 | 70 | 87 | 92 | 0.1 |
| 912933 | 68 | 89 | 90 | 90 | <0.1 |
| 912940 | 86 | 91 | 95 | 96 | <0.1 |
| 912941 | 87 | 94 | 96 | 96 | <0.1 |
| 912952 | 68 | 85 | 90 | 91 | <0.1 |
| 912953 | 80 | 90 | 95 | 93 | <0.1 |
| 912964 | 59 | 78 | 88 | 91 | <0.1 |
| 912973 | 53 | 70 | 87 | 91 | <0.1 |
| 912980 | 54 | 77 | 84 | 88 | <0.1 |
| 912985 | 23 | 61 | 81 | 87 | 0.2 |
| 912988 | 65 | 83 | 86 | 89 | <0.1 |

TABLE 39
Multi-dose assay of 3-10-3 cEt gapmers in A431 cells

| | PNPLA3 % Inhibition | | | | |
|---|---|---|---|---|---|
| Compound | 62.5 | 250 | 1,000 | 4,000 | IC₅₀ |
| Number | nM | nM | nM | nM | (μM) |
| 912759 | 72 | 95 | 97 | 99 | <0.1 |
| 912874 | 78 | 90 | 96 | 97 | <0.1 |
| 912875 | 64 | 83 | 92 | 94 | <0.1 |
| 912886 | 49 | 78 | 85 | 92 | <0.1 |
| 912931 | 68 | 88 | 94 | 95 | <0.1 |
| 912934 | 57 | 83 | 90 | 92 | <0.1 |
| 912936 | 50 | 78 | 89 | 89 | <0.1 |
| 912938 | 57 | 73 | 85 | 87 | <0.1 |
| 912943 | 64 | 84 | 90 | 93 | <0.1 |
| 912954 | 80 | 92 | 93 | 94 | <0.1 |
| 912970 | 44 | 73 | 86 | 90 | <0.1 |
| 912986 | 56 | 78 | 91 | 92 | <0.1 |
| 912987 | 79 | 90 | 92 | 88 | <0.1 |
| 912992 | 21 | 59 | 74 | 81 | 0.3 |
| 915603 | 50 | 88 | 96 | 98 | <0.1 |
| 915623 | 81 | 96 | 98 | 98 | <0.1 |
| 915643 | 67 | 89 | 94 | 96 | <0.1 |
| 916602 | 79 | 92 | 95 | 96 | <0.1 |
| 916642 | 44 | 83 | 91 | 93 | <0.1 |

TABLE 40
Multi-dose assay of 3-10-3 cEt gapmers in A431 cells

| | PNPLA3 % Inhibition | | | | |
|---|---|---|---|---|---|
| Compound | 62.5 | 250 | 1,000 | 4,000 | IC₅₀ |
| Number | nM | nM | nM | nM | (μM) |
| 912759 | 73 | 94 | 98 | 99 | <0.1 |
| 915484 | 67 | 87 | 93 | 95 | <0.1 |
| 915543 | 34 | 69 | 87 | 90 | 0.1 |
| 915604 | 54 | 78 | 91 | 95 | <0.1 |
| 915763 | 63 | 80 | 87 | 87 | <0.1 |
| 915904 | 50 | 83 | 92 | 94 | <0.1 |
| 915923 | 63 | 74 | 82 | 87 | <0.1 |
| 916183 | 33 | 78 | 89 | 91 | 0.1 |
| 916303 | 58 | 73 | 84 | 91 | <0.1 |
| 916343 | 15 | 72 | 76 | 87 | 0.2 |
| 916563 | 46 | 74 | 90 | 95 | <0.1 |
| 916582 | 48 | 74 | 89 | 91 | <0.1 |
| 916623 | 64 | 81 | 91 | 94 | <0.1 |
| 916702 | 45 | 70 | 78 | 79 | <0.1 |
| 916761 | 46 | 75 | 85 | 88 | <0.1 |
| 916781 | 55 | 79 | 86 | 87 | <0.1 |
| 916782 | 62 | 87 | 91 | 93 | <0.1 |
| 916802 | 66 | 88 | 94 | 91 | <0.1 |
| 916822 | 29 | 72 | 83 | 87 | 0.1 |

TABLE 41
Multi-dose assay of 3-10-3 cEt gapmers in A431 cells

| | PNPLA3 % Inhibition | | | | |
|---|---|---|---|---|---|
| Compound | 62.5 | 250 | 1,000 | 4,000 | IC₅₀ |
| Number | nM | nM | nM | nM | (μM) |
| 912759 | 72 | 95 | 98 | 99 | <0.1 |
| 915525 | 51 | 76 | 88 | 84 | <0.1 |
| 915546 | 39 | 79 | 90 | 94 | 0.1 |
| 915605 | 59 | 84 | 96 | 96 | <0.1 |
| 915606 | 74 | 94 | 99 | 98 | <0.1 |
| 915625 | 72 | 82 | 91 | 95 | <0.1 |
| 915944 | 36 | 71 | 75 | 83 | 0.1 |
| 916065 | 36 | 62 | 78 | 79 | 0.1 |
| 916144 | 71 | 86 | 90 | 92 | <0.1 |
| 916163 | 36 | 67 | 81 | 74 | 0.1 |
| 916164 | 82 | 88 | 89 | 92 | <0.1 |
| 916184 | 60 | 79 | 87 | 89 | <0.1 |
| 916304 | 46 | 65 | 80 | 84 | 0.1 |
| 916324 | 57 | 77 | 87 | 92 | <0.1 |
| 916344 | 41 | 70 | 83 | 88 | 0.1 |
| 916564 | 38 | 66 | 88 | 94 | 0.1 |
| 916604 | 67 | 87 | 95 | 96 | <0.1 |
| 916624 | 43 | 59 | 79 | 87 | 0.1 |
| 916803 | 67 | 84 | 93 | 92 | <0.1 |

TABLE 42
Multi-dose assay of 3-10-3 cEt gapmers in A431 cells

| | PNPLA3 % Inhibition | | | | |
|---|---|---|---|---|---|
| Compound | 62.5 | 250 | 1,000 | 4,000 | IC₅₀ |
| Number | nM | nM | nM | nM | (μM) |
| 912759 | 70 | 94 | 98 | 99 | <0.1 |
| 915486 | 35 | 64 | 82 | 90 | 0.1 |
| 915487 | 62 | 89 | 94 | 95 | <0.1 |
| 915626 | 67 | 83 | 92 | 94 | <0.1 |
| 915786 | 65 | 84 | 88 | 88 | <0.1 |
| 916145 | 53 | 66 | 85 | 87 | <0.1 |
| 916146 | 62 | 77 | 86 | 86 | <0.1 |
| 916165 | 71 | 86 | 89 | 88 | <0.1 |
| 916166 | 71 | 83 | 87 | 88 | <0.1 |
| 916305 | 57 | 86 | 90 | 92 | <0.1 |
| 916306 | 86 | 96 | 98 | 98 | <0.1 |
| 916325 | 59 | 78 | 83 | 86 | <0.1 |
| 916345 | 21 | 47 | 67 | 73 | 0.4 |
| 916545 | 63 | 88 | 95 | 94 | <0.1 |
| 916546 | 66 | 85 | 92 | 95 | <0.1 |
| 916625 | 47 | 71 | 84 | 92 | <0.1 |
| 916706 | 22 | 65 | 80 | 85 | 0.2 |
| 916765 | 67 | 85 | 92 | 93 | <0.1 |
| 916845 | 38 | 71 | 80 | 87 | 0.1 |

TABLE 43
Multi-dose assay of 3-10-3 cEt gapmers in A431 cells

| | PNPLA3 % Inhibition | | | | |
|---|---|---|---|---|---|
| Compound | 62.5 | 250 | 1,000 | 4,000 | IC₅₀ |
| Number | nM | nM | nM | nM | (μM) |
| 912759 | 97 | 99 | 100 | 100 | <0.1 |
| 915608 | 66 | 91 | 97 | 97 | <0.1 |
| 915609 | 71 | 97 | 99 | 99 | <0.1 |
| 915627 | 0 | 26 | 53 | 62 | 1.3 |
| 915768 | 39 | 69 | 86 | 91 | 0.1 |
| 915908 | 49 | 70 | 80 | 85 | <0.1 |
| 915987 | 47 | 60 | 75 | 78 | 0.1 |
| 916008 | 45 | 69 | 84 | 83 | <0.1 |
| 916187 | 71 | 82 | 88 | 92 | <0.1 |
| 916247 | 34 | 72 | 83 | 84 | 0.1 |
| 916287 | 31 | 70 | 90 | 91 | 0.1 |
| 916547 | 79 | 93 | 97 | 97 | <0.1 |
| 916566 | 8 | 45 | 73 | 81 | 0.5 |
| 916586 | 47 | 67 | 89 | 91 | <0.1 |
| 916587 | 48 | 81 | 90 | 94 | <0.1 |
| 916606 | 18 | 64 | 87 | 90 | 0.2 |
| 916607 | 72 | 94 | 94 | 95 | <0.1 |
| 916627 | 18 | 51 | 82 | 79 | 0.3 |
| 916805 | 18 | 65 | 78 | 81 | 0.2 |

TABLE 44
Multi-dose assay of 3-10-3 cEt gapmers in A431 cells

| | PNPLA3 % Inhibition | | | | |
|---|---|---|---|---|---|
| Compound | 62.5 | 250 | 1,000 | 4,000 | IC₅₀ |
| Number | nM | nM | nM | nM | (μM) |
| 912759 | 64 | 92 | 97 | 99 | <0.1 |
| 915610 | 74 | 94 | 98 | 99 | <0.1 |
| 915789 | 35 | 72 | 82 | 85 | 0.1 |
| 915909 | 52 | 69 | 82 | 86 | <0.1 |
| 915929 | 13 | 32 | 60 | 59 | 1.0 |
| 915969 | 39 | 54 | 74 | 74 | 0.2 |
| 915989 | 46 | 67 | 81 | 86 | 0.1 |
| 916069 | 24 | 59 | 75 | 56 | 0.3 |
| 916148 | 42 | 71 | 85 | 80 | <0.1 |
| 916168 | 28 | 54 | 74 | 68 | 0.3 |
| 916188 | 22 | 42 | 72 | 70 | 0.4 |
| 916309 | 30 | 77 | 91 | 96 | 0.1 |
| 916348 | 41 | 57 | 65 | 73 | 0.1 |
| 916549 | 64 | 85 | 94 | 96 | <0.1 |
| 916568 | 54 | 66 | 81 | 87 | <0.1 |
| 916569 | 60 | 86 | 92 | 95 | <0.1 |
| 916728 | 22 | 50 | 68 | 73 | 0.4 |
| 916788 | 60 | 89 | 94 | 96 | <0.1 |
| 916848 | 49 | 75 | 89 | 95 | <0.1 |

TABLE 45
Multi-dose assay of 3-10-3 cEt gapmers in A431 cells

| | PNPLA3 % Inhibition | | | | |
|---|---|---|---|---|---|
| Compound | 62.5 | 250 | 1,000 | 4,000 | IC₅₀ |
| Number | nM | nM | nM | nM | (μM) |
| 912759 | 81 | 93 | 98 | 100 | <0.1 |
| 915390 | 9 | 40 | 67 | 77 | 0.6 |
| 915611 | 46 | 80 | 93 | 88 | <0.1 |
| 915630 | 52 | 69 | 81 | 82 | <0.1 |
| 915910 | 44 | 64 | 79 | 80 | 0.1 |
| 915931 | 83 | 88 | 89 | 86 | <0.1 |
| 916149 | 73 | 87 | 89 | 83 | <0.1 |
| 916150 | 51 | 68 | 77 | 84 | <0.1 |
| 916189 | 60 | 73 | 77 | 79 | <0.1 |
| 916310 | 45 | 77 | 88 | 95 | <0.1 |
| 916330 | 48 | 67 | 84 | 86 | <0.1 |
| 916550 | 62 | 85 | 94 | 97 | <0.1 |
| 916570 | 89 | 96 | 98 | 98 | <0.1 |
| 916629 | 26 | 53 | 73 | 86 | 0.3 |
| 916630 | 52 | 68 | 87 | 91 | <0.1 |
| 916670 | 43 | 77 | 78 | 85 | <0.1 |
| 916730 | 61 | 74 | 82 | 86 | <0.1 |
| 916768 | 35 | 57 | 67 | 72 | 0.2 |
| 916789 | 79 | 92 | 96 | 96 | <0.1 |

TABLE 46
Multi-dose assay of 3-10-3 cEt gapmers in A431 cells

| | PNPLA3 % Inhibition | | | | |
|---|---|---|---|---|---|
| Compound | 62.5 | 250 | 1,000 | 4,000 | IC₅₀ |
| Number | nM | nM | nM | nM | (μM) |
| 912759 | 76 | 94 | 96 | 99 | <0.1 |
| 915532 | 31 | 66 | 82 | 92 | 0.1 |
| 915612 | 54 | 77 | 86 | 90 | <0.1 |
| 915732 | 42 | 63 | 80 | 84 | 0.1 |
| 915932 | 45 | 71 | 88 | 89 | <0.1 |
| 915951 | 26 | 58 | 71 | 74 | 0.3 |
| 915991 | 67 | 84 | 85 | 85 | <0.1 |
| 915992 | 54 | 78 | 86 | 87 | <0.1 |
| 916112 | 35 | 67 | 76 | 78 | 0.1 |
| 916151 | 51 | 79 | 87 | 90 | <0.1 |
| 916311 | 36 | 70 | 81 | 87 | 0.1 |
| 916331 | 56 | 85 | 93 | 95 | <0.1 |
| 916332 | 82 | 91 | 94 | 96 | <0.1 |
| 916390 | 30 | 41 | 68 | 64 | 0.5 |
| 916552 | 79 | 93 | 96 | 97 | <0.1 |
| 916571 | 53 | 78 | 90 | 94 | <0.1 |
| 916631 | 48 | 77 | 86 | 90 | <0.1 |
| 916651 | 81 | 89 | 94 | 95 | <0.1 |
| 916711 | 37 | 66 | 85 | 91 | 0.1 |

TABLE 47
Multi-dose assay of 3-10-3 cEt gapmers in A431 cells

| | PNPLA3 % Inhibition | | | | |
|---|---|---|---|---|---|
| Compound | 62.5 | 250 | 1,000 | 4,000 | IC₅₀ |
| Number | nM | nM | nM | nM | (μM) |
| 912759 | 58 | 90 | 98 | 99 | <0.1 |
| 915474 | 51 | 79 | 90 | 93 | <0.1 |
| 915493 | 48 | 58 | 83 | 80 | 0.1 |
| 915494 | 46 | 73 | 86 | 90 | <0.1 |
| 915674 | 49 | 72 | 89 | 93 | <0.1 |
| 915933 | 40 | 63 | 75 | 79 | 0.1 |
| 916153 | 68 | 86 | 89 | 91 | <0.1 |
| 916172 | 85 | 89 | 87 | 87 | <0.1 |
| 916173 | 81 | 90 | 91 | 88 | <0.1 |
| 916292 | 64 | 83 | 92 | 92 | <0.1 |
| 916312 | 60 | 84 | 91 | 92 | <0.1 |
| 916333 | 75 | 92 | 96 | 96 | <0.1 |
| 916572 | 29 | 62 | 79 | 88 | 0.2 |
| 916592 | 52 | 74 | 89 | 90 | <0.1 |
| 916593 | 25 | 67 | 83 | 93 | 0.2 |
| 916613 | 46 | 75 | 89 | 92 | <0.1 |
| 916652 | 65 | 83 | 91 | 88 | <0.1 |
| 916672 | 73 | 89 | 93 | 90 | <0.1 |
| 916772 | 50 | 61 | 83 | 89 | <0.1 |

TABLE 48
Multi-dose assay of 3-10-3 cEt gapmers in A431 cells

| | PNPLA3 % Inhibition | | | | |
|---|---|---|---|---|---|
| Compound | 62.5 | 250 | 1,000 | 4,000 | IC₅₀ |
| Number | nM | nM | nM | nM | (μM) |
| 912759 | 50 | 89 | 96 | 99 | <0.1 |
| 915534 | 0 | 33 | 66 | 57 | 1.1 |
| 915535 | 51 | 81 | 92 | 96 | <0.1 |
| 915634 | 18 | 67 | 79 | 84 | 0.2 |
| 915635 | 44 | 72 | 86 | 91 | 0.1 |
| 915675 | 36 | 68 | 82 | 90 | 0.1 |
| 915735 | 45 | 68 | 73 | 84 | 0.1 |
| 915936 | 36 | 67 | 78 | 83 | 0.1 |
| 915995 | 78 | 87 | 90 | 89 | <0.1 |
| 915996 | 83 | 91 | 93 | 92 | <0.1 |
| 916174 | 80 | 84 | 86 | 81 | <0.1 |
| 916175 | 55 | 82 | 86 | 89 | <0.1 |
| 916334 | 50 | 82 | 92 | 94 | <0.1 |
| 916335 | 52 | 76 | 89 | 93 | <0.1 |
| 916575 | 62 | 88 | 93 | 93 | <0.1 |
| 916753 | 49 | 69 | 76 | 74 | <0.1 |
| 916774 | 49 | 72 | 86 | 91 | <0.1 |
| 916794 | 26 | 64 | 85 | 85 | 0.2 |
| 916873 | 16 | 49 | 72 | 82 | 0.4 |

TABLE 49
Multi-dose assay of 3-10-3 cEt gapmers in A431 cells

| | PNPLA3 % Inhibition | | | | |
|---|---|---|---|---|---|
| Compound | 62.5 | 250 | 1,000 | 4,000 | IC₅₀ |
| Number | nM | nM | nM | nM | (μM) |
| 912759 | 57 | 90 | 97 | 99 | <0.1 |
| 915477 | 47 | 65 | 88 | 93 | 0.1 |
| 915478 | 47 | 78 | 90 | 95 | <0.1 |
| 915497 | 63 | 68 | 79 | 86 | <0.1 |
| 915637 | 67 | 91 | 97 | 98 | <0.1 |
| 916037 | 15 | 47 | 70 | 61 | 0.6 |
| 916236 | 80 | 87 | 90 | 88 | <0.1 |
| 916336 | 52 | 67 | 81 | 87 | <0.1 |
| 916576 | 50 | 76 | 89 | 93 | <0.1 |
| 916596 | 55 | 82 | 93 | 94 | <0.1 |
| 916636 | 42 | 71 | 87 | 90 | 0.1 |
| 916637 | 56 | 85 | 90 | 93 | <0.1 |
| 916715 | 27 | 38 | 68 | 68 | 0.5 |
| 916716 | 35 | 77 | 89 | 93 | 0.1 |
| 916796 | 14 | 62 | 84 | 89 | 0.3 |
| 916814 | 22 | 44 | 70 | 79 | 0.4 |
| 916815 | 56 | 79 | 87 | 89 | <0.1 |
| 916816 | 33 | 72 | 83 | 93 | 0.1 |
| 916874 | 5 | 34 | 61 | 70 | 0.8 |

TABLE 50
Multi-dose assay of 3-10-3 cEt gapmers in A431 cells

| | PNPLA3 % Inhibition | | | | |
|---|---|---|---|---|---|
| Compound | 62.5 | 250 | 1,000 | 4,000 | IC₅₀ |
| Number | nM | nM | nM | nM | (μM) |
| 912759 | 56 | 91 | 97 | 100 | <0.1 |
| 915479 | 38 | 70 | 89 | 94 | 0.1 |
| 915618 | 42 | 63 | 75 | 85 | 0.1 |
| 915619 | 65 | 87 | 96 | 97 | <0.1 |
| 915638 | 31 | 64 | 80 | 82 | 0.2 |
| 915639 | 33 | 78 | 88 | 93 | 0.1 |
| 915778 | 41 | 50 | 78 | 87 | 0.2 |
| 916058 | 26 | 34 | 73 | 81 | 0.4 |
| 916177 | 38 | 55 | 83 | 82 | 0.1 |
| 916238 | 84 | 91 | 93 | 93 | <0.1 |
| 916298 | 79 | 87 | 92 | 94 | <0.1 |
| 916318 | 59 | 71 | 91 | 94 | <0.1 |
| 916338 | 71 | 91 | 94 | 92 | <0.1 |
| 916558 | 73 | 89 | 94 | 94 | <0.1 |
| 916577 | 41 | 66 | 78 | 82 | 0.1 |
| 916578 | 69 | 85 | 91 | 93 | <0.1 |
| 916638 | 46 | 84 | 90 | 92 | <0.1 |
| 916757 | 33 | 60 | 82 | 88 | 0.2 |
| 916817 | 31 | 67 | 82 | 87 | 0.1 |

TABLE 51
Multi-dose assay of 3-10-3 cEt gapmers in A431 cells

| | PNPLA3 % Inhibition | | | | |
|---|---|---|---|---|---|
| Compound | 62.5 | 250 | 1,000 | 4,000 | IC₅₀ |
| Number | nM | nM | nM | nM | (μM) |
| 841947 | 50 | 78 | 89 | 92 | <0.1 |
| 912759 | 75 | 50 | 85 | 99 | <0.1 |
| 912986 | 54 | 78 | 90 | 95 | <0.1 |
| 915480 | 61 | 87 | 94 | 97 | <0.1 |
| 915519 | 47 | 77 | 86 | 85 | <0.1 |
| 915620 | 46 | 75 | 88 | 91 | <0.1 |
| 915780 | 24 | 76 | 92 | 94 | 0.1 |
| 915920 | 23 | 65 | 79 | 82 | 0.2 |
| 916020 | 45 | 80 | 85 | 81 | <0.1 |
| 916299 | 59 | 87 | 92 | 93 | <0.1 |
| 916339 | 88 | 95 | 97 | 97 | <0.1 |
| 916340 | 83 | 96 | 97 | 98 | <0.1 |
| 916559 | 41 | 68 | 83 | 89 | 0.1 |
| 916579 | 71 | 86 | 96 | 96 | <0.1 |
| 916580 | 59 | 90 | 95 | 96 | <0.1 |
| 916618 | 10 | 47 | 70 | 78 | 0.5 |
| 916639 | 38 | 58 | 80 | 86 | 0.1 |
| 916778 | 68 | 87 | 92 | 94 | <0.1 |
| 916818 | 60 | 77 | 90 | 91 | <0.1 |

TABLE 52
Multi-dose assay of 3-10-3 cEt gapmers in A431 cells

| | PNPLA3 % Inhibition | | | | |
|---|---|---|---|---|---|
| Compound | 62.5 | 250 | 1,000 | 4,000 | IC₅₀ |
| Number | nM | nM | nM | nM | (μM) |
| 912759 | 60 | 0 | 85 | 99 | 0.3 |
| 915541 | 48 | 71 | 89 | 91 | <0.1 |
| 915542 | 50 | 72 | 86 | 93 | <0.1 |
| 915601 | 8 | 53 | 84 | 84 | 0.3 |
| 915602 | 1 | 56 | 77 | 91 | 0.4 |
| 915621 | 21 | 54 | 75 | 80 | 0.3 |
| 915622 | 0 | 44 | 73 | 84 | 0.5 |
| 915922 | 27 | 64 | 79 | 85 | 0.2 |
| 916042 | 6 | 57 | 89 | 88 | 0.3 |
| 916140 | 43 | 82 | 90 | 89 | <0.1 |
| 916141 | 72 | 88 | 93 | 91 | <0.1 |
| 916180 | 33 | 62 | 69 | 83 | 0.2 |
| 916181 | 53 | 80 | 89 | 92 | <0.1 |
| 916341 | 0 | 78 | 94 | 94 | 0.3 |
| 916560 | 72 | 91 | 95 | 94 | <0.1 |
| 916581 | 38 | 76 | 91 | 91 | 0.1 |
| 916601 | 44 | 80 | 88 | 90 | <0.1 |
| 916701 | 61 | 83 | 91 | 93 | <0.1 |
| 916780 | 75 | 91 | 93 | 94 | <0.1 |

TABLE 53
Multi-dose assay of 3-10-3 cEt gapmers in A431 cells

| | PNPLA3 % Inhibition | | | | |
|---|---|---|---|---|---|
| Compound | 15.6 | 62.5 | 250 | 1,000 | IC₅₀ |
| Number | nM | nM | nM | nM | (μM) |
| 915609 | 52 | 86 | 96 | 99 | <0.01 |
| 959430 | 42 | 76 | 90 | 95 | <0.01 |
| 959440 | 39 | 73 | 92 | 98 | 0.02 |
| 959470 | 46 | 73 | 89 | 94 | <0.01 |
| 959670 | 52 | 90 | 96 | 98 | <0.01 |
| 959680 | 50 | 75 | 91 | 96 | <0.01 |
| 959730 | 83 | 96 | 98 | 98 | <0.01 |
| 959740 | 50 | 70 | 90 | 96 | <0.01 |
| 959820 | 40 | 69 | 85 | 92 | 0.02 |
| 959830 | 46 | 69 | 93 | 97 | 0.02 |
| 959880 | 34 | 62 | 85 | 93 | 0.03 |
| 960010 | 48 | 78 | 92 | 95 | <0.01 |

TABLE 54
Multi-dose assay of 3-10-3 cEt gapmers in A431 cells

| | PNPLA3 % Inhibition | | | | |
|---|---|---|---|---|---|
| Compound | 15.6 | 62.5 | 250 | 1,000 | IC₅₀ |
| Number | nM | nM | nM | nM | (μM) |
| 915609 | 53 | 87 | 98 | 99 | <0.01 |
| 959271 | 55 | 74 | 91 | 91 | <0.01 |
| 959360 | 7 | 43 | 79 | 85 | 0.1 |
| 959361 | 60 | 87 | 93 | 94 | <0.01 |
| 959411 | 56 | 76 | 91 | 94 | <0.01 |
| 959441 | 50 | 81 | 93 | 97 | <0.01 |
| 959460 | 0 | 29 | 75 | 90 | 0.2 |
| 959701 | 62 | 91 | 97 | 98 | <0.01 |
| 959721 | 80 | 94 | 97 | 97 | <0.01 |
| 959731 | 25 | 64 | 82 | 91 | 0.05 |
| 959741 | 41 | 65 | 83 | 91 | 0.02 |
| 959750 | 0 | 26 | 65 | 87 | 0.2 |
| 959761 | 28 | 60 | 84 | 91 | 0.05 |
| 959781 | 39 | 58 | 75 | 87 | 0.04 |
| 959911 | 20 | 54 | 78 | 90 | 0.1 |
| 959921 | 37 | 61 | 83 | 91 | 0.03 |
| 959931 | 48 | 72 | 89 | 92 | <0.01 |
| 959960 | 11 | 51 | 79 | 90 | 0.1 |
| 959961 | 38 | 64 | 85 | 92 | 0.03 |

TABLE 55
Multi-dose assay of 3-10-3 cEt gapmers in A431 cells

| | PNPLA3 % Inhibition | | | | |
|---|---|---|---|---|---|
| Compound | 15.6 | 62.5 | 250 | 1,000 | IC₅₀ |
| Number | nM | nM | nM | nM | (μM) |
| 915609 | 11 | 71 | 93 | 98 | 0.1 |
| 959412 | 52 | 77 | 90 | 94 | <0.01 |
| 959413 | 34 | 82 | 95 | 97 | 0.02 |
| 959422 | 15 | 50 | 80 | 87 | 0.1 |
| 959432 | 33 | 60 | 86 | 95 | 0.04 |
| 959662 | 0 | 53 | 84 | 92 | 0.1 |
| 959672 | 54 | 85 | 95 | 97 | <0.01 |
| 959673 | 18 | 62 | 88 | 95 | 0.1 |
| 959682 | 46 | 77 | 90 | 91 | <0.01 |
| 959702 | 39 | 71 | 91 | 96 | 0.02 |
| 959703 | 81 | 96 | 99 | 99 | <0.01 |
| 959712 | 4 | 30 | 75 | 92 | 0.1 |
| 959713 | 0 | 53 | 86 | 96 | 0.1 |
| 959722 | 33 | 80 | 90 | 94 | 0.02 |
| 959733 | 31 | 68 | 92 | 96 | 0.03 |
| 959782 | 35 | 63 | 86 | 94 | 0.03 |
| 959872 | 29 | 64 | 77 | 89 | 0.04 |
| 959912 | 25 | 69 | 89 | 92 | 0.04 |
| 959982 | 21 | 61 | 83 | 91 | 0.1 |

TABLE 56
Multi-dose assay of 3-10-3 cEt gapmers in A431 cells

| | PNPLA3 % Inhibition | | | | |
|---|---|---|---|---|---|
| Compound | 15.6 | 62.5 | 250 | 1,000 | IC₅₀ |
| Number | nM | nM | nM | nM | (μM) |
| 915609 | 2 | 73 | 93 | 98 | 0.1 |
| 959363 | 49 | 82 | 91 | 91 | <0.01 |
| 959393 | 38 | 71 | 87 | 95 | 0.02 |
| 959394 | 27 | 73 | 91 | 97 | 0.03 |
| 959414 | 69 | 94 | 98 | 99 | <0.01 |
| 959664 | 51 | 77 | 95 | 98 | <0.01 |
| 959674 | 43 | 74 | 95 | 98 | 0.02 |
| 959683 | 14 | 71 | 90 | 96 | 0.05 |
| 959704 | 57 | 92 | 98 | 99 | <0.01 |
| 959724 | 0 | 68 | 90 | 95 | 0.1 |
| 959734 | 71 | 93 | 98 | 98 | <0.01 |
| 959814 | 24 | 76 | 90 | 95 | 0.03 |
| 959873 | 38 | 53 | 83 | 90 | 0.04 |
| 959874 | 51 | 82 | 95 | 97 | <0.01 |
| 959884 | 44 | 77 | 94 | 97 | <0.01 |
| 959913 | 18 | 50 | 85 | 92 | 0.1 |
| 959953 | 6 | 51 | 85 | 92 | 0.1 |
| 959983 | 22 | 54 | 81 | 92 | 0.1 |
| 960004 | 10 | 71 | 92 | 96 | 0.1 |

TABLE 57
Multi-dose assay of 3-10-3 cEt gapmers in A431 cells

| | PNPLA3 % Inhibition | | | | |
|---|---|---|---|---|---|
| Compound | 15.6 | 62.5 | 250 | 1,000 | IC₅₀ |
| Number | nM | nM | nM | nM | (μM) |
| 915609 | 12 | 69 | 93 | 98 | 0.1 |
| 959364 | 32 | 72 | 89 | 91 | 0.03 |
| 959415 | 21 | 70 | 91 | 96 | 0.04 |
| 959444 | 6 | 47 | 82 | 91 | 0.1 |
| 959445 | 32 | 70 | 92 | 97 | 0.03 |
| 959455 | 61 | 87 | 95 | 97 | <0.01 |
| 959675 | 20 | 56 | 80 | 94 | 0.1 |
| 959684 | 8 | 47 | 83 | 86 | 0.1 |
| 959705 | 77 | 95 | 98 | 99 | <0.01 |
| 959735 | 12 | 67 | 90 | 95 | 0.1 |
| 959764 | 4 | 32 | 80 | 92 | 0.1 |
| 959765 | 1 | 59 | 88 | 93 | 0.1 |
| 959784 | 3 | 35 | 75 | 90 | 0.1 |
| 959785 | 27 | 72 | 92 | 96 | 0.03 |
| 959794 | 0 | 0 | 53 | 83 | 0.3 |
| 959864 | 26 | 61 | 84 | 91 | 0.05 |
| 959885 | 49 | 81 | 95 | 96 | <0.01 |
| 959914 | 7 | 43 | 76 | 89 | 0.1 |
| 959964 | 17 | 55 | 83 | 91 | 0.1 |

TABLE 58
Multi-dose assay of 3-10-3 cEt gapmers in A431 cells

| | PNPLA3 % Inhibition | | | | |
|---|---|---|---|---|---|
| Compound | 15.6 | 62.5 | 250 | 1,000 | IC₅₀ |
| Number | nM | nM | nM | nM | (μM) |
| 915609 | 0 | 73 | 95 | 97 | 0.1 |
| 959456 | 66 | 90 | 97 | 98 | <0.01 |
| 959666 | 29 | 60 | 89 | 97 | 0.04 |
| 959676 | 15 | 44 | 81 | 93 | 0.1 |
| 959686 | 71 | 92 | 97 | 97 | <0.01 |
| 959695 | 40 | 75 | 91 | 93 | 0.02 |
| 959696 | 21 | 81 | 90 | 92 | 0.03 |
| 959706 | 81 | 95 | 98 | 98 | <0.01 |
| 959725 | 8 | 55 | 76 | 84 | 0.1 |
| 959726 | 0 | 59 | 88 | 91 | 0.1 |
| 959736 | 46 | 84 | 94 | 98 | <0.01 |
| 959766 | 22 | 57 | 83 | 94 | 0.1 |
| 959776 | 1 | 53 | 87 | 93 | 0.1 |
| 959815 | 31 | 67 | 89 | 91 | 0.03 |
| 959865 | 6 | 49 | 84 | 91 | 0.1 |
| 959875 | 34 | 74 | 91 | 92 | 0.02 |
| 959935 | 22 | 55 | 84 | 94 | 0.1 |
| 959955 | 0 | 55 | 83 | 89 | 0.1 |
| 959985 | 29 | 71 | 88 | 93 | 0.03 |

TABLE 59
Multi-dose assay of 3-10-3 cEt gapmers in A431 cells

| | PNPLA3 % Inhibition | | | | |
|---|---|---|---|---|---|
| Compound | 15.6 | 62.5 | 250 | 1,000 | IC₅₀ |
| Number | nM | nM | nM | nM | (μM) |
| 915609 | 37 | 80 | 96 | 99 | 0.02 |
| 959356 | 40 | 71 | 87 | 88 | 0.02 |
| 959417 | 25 | 58 | 83 | 92 | 0.1 |
| 959437 | 65 | 88 | 94 | 95 | <0.01 |
| 959667 | 37 | 69 | 90 | 95 | 0.02 |
| 959677 | 29 | 56 | 82 | 92 | 0.05 |
| 959687 | 51 | 79 | 93 | 97 | <0.01 |
| 959697 | 51 | 75 | 93 | 95 | <0.01 |
| 959707 | 81 | 94 | 98 | 98 | <0.01 |
| 959727 | 71 | 92 | 96 | 96 | <0.01 |
| 959737 | 45 | 75 | 89 | 94 | <0.01 |
| 959767 | 47 | 76 | 93 | 96 | <0.01 |
| 959797 | 32 | 59 | 87 | 94 | 0.04 |
| 959856 | 13 | 35 | 67 | 80 | 0.1 |
| 959876 | 38 | 75 | 89 | 90 | 0.02 |
| 959877 | 40 | 81 | 89 | 94 | <0.01 |
| 959956 | 25 | 25 | 66 | 85 | 0.1 |
| 960006 | 13 | 40 | 68 | 83 | 0.1 |
| 960007 | 24 | 59 | 88 | 91 | 0.05 |

### Example 3: Tolerability of Modified Oligonucleotides Targeting Human PNPLA3 in BALB/c Mice

[0361] BALB/c mice are a multipurpose mouse model frequently utilized for safety and efficacy testing. The mice were treated with antisense oligonucleotides selected from studies described above and evaluated for changes in the levels of various plasma chemistry markers.

[0362] Ionis oligonucleotides selected from the studies above were conjugated with 3′-THA-C₆-GalNAc₃-(3R,5S)-5-(hydroxymethyl) pyrrolidin-3-ol phosphate endcap (henceforth referred to as 3′-THA).

### Treatment

[0363] Groups of 6- to 7-week-old male mice were injected subcutaneously once with 200 mg/kg of modified oligonucleotides. One group of male BALB/c mice was injected with PBS. Mice were euthanized 72-96 hours after the single dose and plasma was harvested for further analysis.

[0364] To evaluate the effect of modified oligonucleotides on liver function, plasma levels of transaminases were measured using an automated clinical chemistry analyzer (Beckman Coulter AU480, Brea, CA). Modified oligonucleotides that caused changes in the levels of transaminases outside the expected range for antisense oligonucleotides were excluded in further studies. The oligonucleotides which were considered tolerable in this study and were selected for further evaluation are presented in the Table below. ‘Parent Oligo’ indicates the Ionis oligonucleotide that has been described in the studies above and that was conjugated with 3′-THA and tested in this study.

TABLE 60
Antisense oligonucleotides in BALB/c mouse study

| Compound ID | Parent oligo ID |
|---|---|
| 975746 | 916339 |
| 975747 | 912941 |
| 975748 | 916306 |
| 975755 | 916332 |
| 975760 | 912848 |
| 975764 | 916298 |
| 975766 | 916552 |
| 975767 | 916789 |
| 975768 | 916602 |
| 975770 | 912874 |
| 975771 | 916333 |
| 975772 | 916780 |
| 975775 | 916672 |
| 975777 | 916558 |
| 975780 | 916607 |
| 975783 | 916338 |
| 975788 | 912847 |
| 975790 | 916778 |
| 975792 | 912870 |
| 975794 | 916802 |
| 975797 | 916637 |
| 975799 | 912732 |
| 975800 | 912733 |
| 975803 | 912813 |
| 975804 | 912823 |
| 975805 | 912834 |
| 975806 | 912855 |
| 975807 | 912856 |
| 975808 | 912864 |
| 975809 | 912871 |
| 975810 | 912872 |
| 975811 | 912875 |
| 975813 | 912931 |
| 975814 | 912934 |
| 975815 | 912936 |
| 975816 | 912938 |
| 975817 | 912943 |
| 975820 | 912988 |
| 975822 | 915486 |
| 975829 | 915619 |
| 975836 | 915780 |
| 975840 | 915989 |
| 975844 | 916151 |
| 975849 | 916292 |
| 975850 | 916299 |
| 975851 | 916303 |
| 975852 | 916309 |
| 975853 | 916310 |
| 975854 | 916312 |
| 975855 | 916318 |
| 975856 | 916324 |
| 975857 | 916331 |
| 975858 | 916334 |
| 975859 | 916335 |
| 975860 | 916336 |
| 975861 | 916549 |
| 975862 | 916550 |
| 975864 | 916563 |
| 975865 | 916564 |
| 975866 | 916568 |
| 975868 | 916571 |
| 975869 | 916575 |
| 975870 | 916580 |
| 975871 | 916581 |
| 975873 | 916586 |
| 975875 | 916601 |
| 975878 | 916624 |
| 975879 | 916625 |
| 975880 | 916636 |
| 975881 | 916638 |
| 975883 | 916670 |
| 975886 | 916711 |
| 975887 | 916716 |
| 975888 | 916774 |
| 975889 | 916781 |
| 975890 | 916782 |
| 975891 | 916788 |
| 975893 | 916815 |
| 975894 | 916816 |
| 975895 | 916817 |
| 975896 | 916818 |
| 975897 | 916822 |
| 975898 | 916845 |
| 994288 | 959455 |
| 994289 | 960010 |
| 994290 | 959361 |
| 994291 | 959271 |

### Example 4: Effect of antisense inhibition of PNPLA3 in transgenic mouse model

[0365] A PNPLA3 transgenic mouse model from wild-type C57BL/6 generated by the University of California, Irvine was used. The mouse model comprises a genomic construct containing the entire PNPLA3 gene fosmid, generously provided by the University of Washington. The efficacy of Ionis oligonucleotides was evaluated in this model.

### Treatment

[0366] Transgenic mice were maintained on a 12-hour light/dark cycle and were fed ad libitum normal Purina mouse chow. Animals were acclimated for at least 7 days in the research facility before initiation of the experiment. Antisense oligonucleotides (ASOs) were prepared in buffered saline (PBS) and sterilized by filtering through a 0.2 micron filter. Oligonucleotides were dissolved in 0.9% PBS for injection.

[0367] The hPNPLA3 Tg mice were divided into groups of 2 mice each. Groups received subcutaneous injections of Ionis oligonucleotide at a dose of 2.5 mg/kg on days 1 and 8. One group of 4 mice received subcutaneous injections of PBS on days 1 and 8. The saline-injected group served as the control group to which oligonucleotide-treated groups were compared.

### RNA Analysis

[0368] On day 10, RNA was extracted from liver for real-time PCR analysis of measurement of mRNA expression of PNPLA3. Primer probe sets RTS36070 and RTS36075 were both used to measure PNPLA3 mRNA levels. Results are presented as percent change of mRNA, relative to PBS control, normalized with RIBOGREEN®. As presented in the Table below, treatment with Ionis antisense oligonucleotides resulted in significant reduction of PNPLA3 mRNA in comparison to the PBS control. ‘0’ indicates that the oligonucleotides did not inhibit mRNA expression.

TABLE 61
Percent inhibition of PNPLA3 mRNA in the transgenic
mice liver relative to the PBS control

| | Inhibition (%) | Inhibition (%) |
|---|---|---|
| | measured with | measured with |
| Compound ID | RTS36070 | RTS36075 |
| 975746 | 99 | 99 |
| 975747 | 99 | 99 |
| 975748 | 98 | 98 |
| 975755 | 99 | 99 |
| 975760 | 96 | 97 |
| 975764 | 75 | 83 |
| 975766 | 99 | 99 |
| 975767 | 98 | 98 |
| 975768 | 98 | 98 |
| 975770 | 97 | 97 |
| 975771 | 98 | 99 |
| 975772 | 96 | 96 |
| 975775 | 90 | 91 |
| 975777 | 85 | 89 |
| 975780 | 44 | 63 |
| 975783 | 87 | 90 |
| 975788 | 0 | 26 |
| 975790 | 0 | 0 |
| 975792 | 9 | 34 |
| 975794 | 44 | 50 |
| 975797 | 0 | 0 |
| 975799 | 0 | 0 |
| 975800 | 0 | 5 |
| 975803 | 68 | 68 |
| 975804 | 11 | 38 |
| 975805 | 0 | 0 |
| 975806 | 0 | 0 |
| 975807 | 0 | 0 |
| 975808 | 47 | 58 |
| 975809 | 0 | 19 |
| 975810 | 12 | 22 |
| 975811 | 19 | 32 |
| 975813 | 36 | 39 |
| 975814 | 48 | 54 |
| 975815 | 78 | 77 |
| 975816 | 56 | 56 |
| 975817 | 84 | 86 |
| 975820 | 35 | 45 |
| 975822 | 0 | 0 |
| 975829 | 98 | 98 |
| 975836 | 85 | 91 |
| 975840 | 19 | 44 |
| 975844 | 21 | 31 |
| 975849 | 88 | 89 |
| 975850 | 41 | 48 |
| 975851 | 5 | 18 |
| 975852 | 24 | 41 |
| 975853 | 0 | 0 |
| 975854 | 0 | 0 |
| 975855 | 0 | 0 |
| 975856 | 45 | 31 |
| 975857 | 73 | 67 |
| 975858 | 58 | 40 |
| 975860 | 92 | 92 |
| 975861 | 66 | 49 |
| 975862 | 46 | 36 |
| 975864 | 16 | 21 |
| 975865 | 0 | 0 |
| 975866 | 40 | 41 |
| 975868 | 56 | 48 |
| 975869 | 30 | 19 |
| 975870 | 0 | 14 |
| 975871 | 0 | 0 |
| 975875 | 75 | 73 |
| 975878 | 18 | 12 |
| 975879 | 7 | 0 |
| 975880 | 0 | 0 |
| 975881 | 54 | 54 |
| 975883 | 77 | 80 |
| 975886 | 18 | 28 |
| 975887 | 49 | 57 |
| 975888 | 10 | 9 |
| 975889 | 90 | 91 |
| 975890 | 96 | 98 |
| 975891 | 97 | 98 |
| 975893 | 95 | 95 |
| 975894 | 85 | 87 |
| 975895 | 89 | 89 |
| 975896 | 91 | 89 |
| 975898 | 94 | 95 |
| 975897 | 96 | 97 |
| 975873 | 99 | 99 |
| 994288 | 99 | 99 |
| 994289 | 98 | 99 |
| 994290 | 98 | 99 |
| 994291 | 95 | 95 |
| 975859 | 95 | 96 |

### Example 5: Tolerability of Modified Oligonucleotides Targeting Human PNPLA3 in CD1 Mice

[0369] CD1 ® mice (Charles River, MA) are a multipurpose mice model, frequently utilized for safety and efficacy testing. The mice were treated with Ionis antisense oligonucleotides selected from studies described above and evaluated for changes in the levels of various plasma chemistry markers.

[0370] Ionis oligonucleotides selected from the studies above were conjugated with 5′-Trishexylamino-(THA)-C₆GalNAC3 endcap (henceforth referred to as 5′-THA). The Ionis oligonucleotides tested are presented in the Table below. ‘Unconjugated parent ION No.’ refers to the Ionis oligonucleotide described in the in vitro studies above with the same sequence. ‘3’-THA counterpart ION No.′ refers to the 3′-THA conjugated oligonucleotide with the same sequence and evaluated in the mice studies above.

TABLE 62
5′-THA oligonucleotides tested in CD1 mice tolerability study

| | Unconjugated | 3′-THA | | SEQ |
|---|---|---|---|---|
| Compound | parent ION | counterpart | | ID |
| ID | No. | ION No | Sequence | NO |
| 975591 | 916339 | 975746 | GGATATATTGGGCTCA | 1512 |
| 975592 | 912941 | 975747 | TTGCATTGCATAGCCT | 182 |
| 975593 | 916306 | 975748 | GTGTACTTTAGGCTCC | 598 |
| 975600 | 916332 | 975755 | CACAATGACATCATGG | 1020 |
| 975605 | 912848 | 975760 | CGTTTTTAGTAGTCAA | 141 |
| 975611 | 916552 | 975766 | CCTTTTATTTCCGTTA | 1024 |
| 975612 | 916789 | 975767 | GTAATATTCAGACCAG | 2178 |
| 975613 | 916602 | 975768 | CTAGTAAATGCTTGTC | 2176 |
| 975615 | 912874 | 975770 | ATACTTTTGGCAAGGC | 217 |
| 975616 | 916333 | 975771 | CTTTATTCAATGTGGC | 2174 |
| 975617 | 916780 | 975772 | AGAAATTGCAGTGCCC | 1665 |
| 975674 | 915619 | 975829 | GACTTTAGGGCAGATG | 1400 |
| 975704 | 916335 | 975859 | TAATTCTACCTGTGTC | 1227 |
| 975718 | 916586 | 975873 | AACTTTGCAGCCTATC | 605 |
| 975735 | 916782 | 975890 | CTTAGAAATTGCAGTG | 408 |
| 975736 | 916788 | 975891 | TAATATTCAGACCAGG | 830 |
| 975738 | 916815 | 975893 | CAATTCTAGACATGGC | 1313 |
| 975742 | 916822 | 975897 | TATGACATTTCAGAGT | 410 |
| 975743 | 916845 | 975898 | GTAAAGATGTGAGTGA | 618 |
| 994282 | 959455 | 994288 | TTGGATATATTGGGCT | 1982 |
| 994283 | 960010 | 994289 | AGACATATGACATTTC | 1745 |
| 994284 | 959361 | 994290 | TTTTTAGTAGTCAAGG | 1757 |
| 994285 | 959271 | 994291 | GTTGAAGGATGGATGG | 1748 |

### Treatment

[0371] Groups of four CD1 mice each were weekly injected subcutaneously with 15 mg/kg of Ionis oligonucleotides for 6 weeks, with one loading dose at day 4 (total 8 doses). One group of male CD1 mice was injected subcutaneously for 6 weeks with PBS. Mice were euthanized 48 hours after the last dose, and organs and plasma were harvested for further analysis.

### Plasma Chemistry Markers

[0372] To evaluate the effect of Ionis oligonucleotides on liver and kidney function, plasma levels of transaminases (ALT and AST), albumin, total bilirubin, and creatinine were measured at week 3 using an automated clinical chemistry analyzer (Beckman Coulter AU480, Brea, CA). The results are presented in the Table below. Ionis oligonucleotides that caused changes in the levels of any of the liver or kidney function markers outside the expected range for antisense oligonucleotides were excluded in further studies.

TABLE 63
Plasma chemistry marker levels in CD1 mice at week 3

| | | | | Total | |
|---|---|---|---|---|---|
| | Albumin | ALT | AST | bilirubin | Creatinine |
| | (g/dL) | (IU/L) | (IU/L) | (mg/dL) | (mg/dL) |
| PBS | 2.9 | 31 | 64 | 0.4 | 0.1 |
| 975611 | 2.7 | 640 | 385 | 0.3 | 0.1 |
| 994282 | 2.4 | 76 | 83 | 0.3 | 0.1 |
| 975592 | 3.0 | 786 | 942 | 0.5 | 0.1 |
| 975600 | 2.7 | 334 | 431 | 0.3 | 0.1 |
| 975591 | 2.6 | 62 | 115 | 0.4 | 0.1 |
| 975718 | 2.4 | 1717 | 2183 | 1.2 | 0.1 |
| 994284 | 2.7 | 41 | 97 | 0.3 | 0.1 |
| 994283 | 2.8 | 216 | 154 | 0.3 | 0.1 |
| 975616 | 3.0 | 69 | 137 | 0.3 | 0.1 |
| 975612 | 2.7 | 47 | 218 | 0.4 | 0.1 |
| 975674 | 2.9 | 134 | 114 | 0.4 | 0.1 |
| 975613 | 2.8 | 60 | 277 | 0.3 | 0.1 |
| 975593 | 2.7 | 429 | 405 | 0.4 | 0.1 |
| 975736 | 2.9 | 46 | 63 | 0.2 | 0.2 |
| 975735 | 2.5 | 46 | 79 | 0.2 | 0.1 |
| 975742 | 2.6 | 152 | 96 | 0.2 | 0.1 |
| 975615 | 2.9 | 207 | 189 | 0.4 | 0.1 |
| 975617 | 2.9 | 65 | 70 | 0.3 | 0.1 |
| 975605 | 2.9 | 67 | 92 | 0.3 | 0.1 |
| 975704 | 2.4 | 33 | 61 | 0.2 | 0.1 |
| 975738 | 2.6 | 43 | 67 | 0.2 | 0.1 |
| 975743 | 2.9 | 119 | 126 | 0.4 | 0.1 |
| 994285 | 2.8 | 400 | 353 | 0.2 | 0.1 |

### Hematology Assays

[0373] Blood obtained from selected mouse groups at week 6 were sent to IDEXX BioResearch for measurement of platelet count. The results are presented in the tables below. Ionis oligonucleotides that caused changes in the platelet count outside the expected range for antisense oligonucleotides were excluded in further studies.

TABLE 64
Platelet count in CD1 mice

| | Platelet (×10³/μL) |
|---|---|
| PBS | 1067 |
| 975605 | 1202 |
| 975612 | 1200 |
| 975613 | 1417 |
| 975616 | 1178 |
| 975617 | 922 |
| 975674 | 618 |
| 975591 | 941 |
| 975743 | 1127 |
| 994282 | 1384 |
| 994284 | 1255 |
| 975704 | 939 |
| 975735 | 1039 |
| 975736 | 1116 |
| 975738 | 1126 |
| 975742 | 808 |

### Example 6: Tolerability of Modified Oligonucleotides Targeting Human PNPLA3 in Sprague-Dawley Rats

[0374] Sprague-Dawley rats are a multipurpose model used for safety and efficacy evaluations. The rats were treated with Ionis antisense oligonucleotides from the studies described in the Examples above and evaluated for changes in the levels of various plasma chemistry markers.

### Treatment

[0375] Male Sprague-Dawley rats were maintained on a 12-hour light/dark cycle and fed ad libitum with Purina normal rat chow, diet 5001. Groups of 4 Sprague-Dawley rats each were weekly injected subcutaneously with 15 mg/kg of Ionis oligonucleotide for 6 weeks, with one loading dose on day 4 (total 8 doses). Forty eight hours after the last dose, rats were euthanized and organs and plasma were harvested for further analysis.

### Plasma Chemistry Markers

[0376] To evaluate the effect of Ionis oligonucleotides on hepatic function, plasma levels of transaminases were measured using an automated clinical chemistry analyzer (Beckman Coulter AU480, Brea, CA). Plasma levels of ALT (alanine transaminase) and AST (aspartate transaminase) were measured and the results are presented in the Table below expressed in IU/L. Plasma levels of bilirubin, creatinine, albumin, and BUN were also measured using the same clinical chemistry analyzer and the results are also presented in the Table below expressed in mg/dL. Ionis oligonucleotides that caused changes in the levels of any markers of liver function outside the expected range for antisense oligonucleotides were excluded in further studies.

TABLE 65
Plasma chemistry markers in Sprague-Dawley rats

| | | | | Total | | |
|---|---|---|---|---|---|---|
| | Albumin | ALT | AST | bilirubin | Creatinine | BUN |
| | (g/dL) | (IU/L) | (IU/L) | (mg/dL) | (mg/dL) | (mg/dL) |
| PBS | 3 | 35 | 81 | 0.2 | 0.2 | 12 |
| 975591 | 3 | 57 | 161 | 0.2 | 0.3 | 14 |
| 975605 | 4 | 62 | 176 | 0.3 | 0.2 | 14 |
| 975612 | 3 | 106 | 153 | 0.2 | 0.3 | 13 |
| 975613 | 3 | 32 | 94 | 0.2 | 0.2 | 12 |
| 975616 | 4 | 31 | 106 | 0.2 | 0.3 | 13 |
| 975617 | 3 | 49 | 263 | 0.2 | 0.2 | 12 |
| 975735 | 3 | 44 | 128 | 0.2 | 0.2 | 14 |
| 975736 | 3 | 73 | 293 | 0.3 | 0.3 | 14 |
| 994282 | 3 | 41 | 135 | 0.1 | 0.3 | 12 |
| 994284 | 3 | 32 | 95 | 0.1 | 0.2 | 13 |

### Kidney Function

[0377] To evaluate the effect of Ionis oligonucleotides on kidney function, urinary levels of protein and creatinine were measured using an automated clinical chemistry analyzer (Beckman Coulter AU480, Brea, CA). The ratios of total protein to creatinine are presented in the Table below. Ionis oligonucleotides that caused changes in the levels of the ratio outside the expected range for antisense oligonucleotides were excluded in further studies.

TABLE 66
Total protein to creatinine ratio in Sprague-Dawley rats

| | |
|---|---|
| PBS | 1.5 |
| 975591 | 2.0 |
| 975605 | 1.6 |
| 975612 | 1.9 |
| 975613 | 2.3 |
| 975616 | 2.0 |
| 975617 | 1.4 |
| 975735 | 2.2 |
| 975736 | 1.1 |
| 994282 | 2.1 |
| 994284 | 2.1 |

### Organ Weights

[0378] Liver, heart, spleen and kidney weights were measured at the end of the study, and are presented in the Table below. Ionis oligonucleotides that caused any changes in organ weights outside the expected range for antisense oligonucleotides were excluded from further studies.

TABLE 67
Organ weights (g)

| | Liver | Kidney | Spleen |
|---|---|---|---|
| Saline | 16 | 3 | 1 |
| 975591 | 16 | 4 | 1 |
| 975605 | 21 | 3 | 1 |
| 975612 | 12 | 3 | 1 |
| 975613 | 16 | 3 | 1 |
| 975616 | 15 | 3 | 1 |
| 975617 | 19 | 4 | 2 |
| 975735 | 14 | 4 | 1 |
| 975736 | 15 | 3 | 1 |
| 994282 | 14 | 3 | 1 |
| 994284 | 15 | 3 | 1 |

### Example 7: Effect of Antisense Inhibition of PNPLA3 in Transgenic Mouse Model

[0379] Ionis oligonucleotides were tested in a multi-dose assay in the hPNPLA3 Tg model.

### Treatment

[0380] Transgenic mice were maintained on a 12-hour light/dark cycle and were fed ad libitum normal Purina mouse chow. Animals were acclimated for at least 7 days in the research facility before initiation of the experiment. Antisense oligonucleotides (ASOs) were prepared in buffered saline (PBS) and sterilized by filtering through a 0.2 micron filter. Oligonucleotides were dissolved in 0.9% PBS for injection.

### Study 1

[0381] The hPNPLA3 Tg mice were divided into groups of 4 mice each. Groups received subcutaneous injections of Ionis oligonucleotide at a weekly dose of 5 mg/kg, 1 mg/kg, or 0.25 mg/kg administered on days 1, 5, 8, 15, and 23. One group of 4 mice received subcutaneous injections of PBS on days 1, 5, 8, 15, and 23. The saline-injected group served as the control group to which oligonucleotide-treated groups were compared.

### RNA Analysis

[0382] On day 26, RNA was extracted from liver for real-time PCR analysis of measurement of mRNA expression of PNPLA3. Primer probe sets RTS36070 and RTS36075 were both used to measure PNPLA3 mRNA levels. Results are presented as percent change of mRNA, relative to PBS control, normalized with RIBOGREEN®. As presented in the Table below, treatment with Ionis antisense oligonucleotides resulted in significant dose-dependent reduction of PNPLA3 mRNA in comparison to the PBS control.

TABLE 68
Percent inhibition of PNPLA3 mRNA in the transgenic
mice liver relative to the PBS control

| | | Inhibition | Inhibition | |
|---|---|---|---|---|
| | | measured by | measured by | EC₅₀ |
| | mg/kg/wk | RTS36070 | RTS36075 | (μg/g) |
| 975605 | 5 | 93 | 90 | 2.2 |
| | 1 | 66 | 57 | |
| | 0.25 | 45 | 46 | |
| 975612 | 5 | 98 | 99 | 3.1 |
| | 1 | 89 | 88 | |
| | 0.25 | 34 | 44 | |
| 975613 | 5 | 98 | 97 | 1.0 |
| | 1 | 87 | 85 | |
| | 0.25 | 58 | 56 | |
| 975616 | 5 | 93 | 93 | 0.5 |
| | 1 | 85 | 87 | |
| | 0.25 | 60 | 63 | |
| 975617 | 5 | 97 | 97 | 0.3 |
| | 1 | 76 | 78 | |
| | 0.25 | 55 | 53 | |
| 975735 | 5 | 97 | 98 | 1.5 |
| | 1 | 74 | 75 | |
| | 0.25 | 29 | 33 | |
| 975736 | 5 | 98 | 98 | 0.9 |
| | 1 | 73 | 71 | |
| | 0.25 | 44 | 45 | |
| 994282 | 5 | 98 | 98 | 0.2 |
| | 1 | 91 | 80 | |
| | 0.25 | 62 | 58 | |
| 994284 | 5 | 99 | 100 | 0.3 |
| | 1 | 89 | 88 | |
| | 0.25 | 53 | 47 | |

### Study 2

[0383] The hPNPLA3 Tg mice were divided into groups of 4 mice each. Groups received subcutaneous injections of Ionis oligonucleotide at a weekly dose of 5 mg/kg, 2.5 mg/kg, 1 mg/kg, 0.5 mg/kg, or 0.25 mg/kg administered on days 1, 5, 8, 15, and 23. One group of 4 mice received subcutaneous injections of PBS on days 1, 5, 8, 15, and 23. The saline-injected group served as the control group to which oligonucleotide-treated groups were compared.

### RNA Analysis

[0384] On day 26, RNA was extracted from liver for real-time PCR analysis of measurement of mRNA expression of PNPLA3. Primer probe sets RTS36070 and RTS36075 were both used to measure PNPLA3 mRNA levels. Results are presented as percent change of mRNA, relative to PBS control, normalized with RIBOGREEN®. As presented in the Table below, treatment with Ionis antisense oligonucleotides resulted in significant dose-dependent reduction of PNPLA3 mRNA in comparison to the PBS control.

TABLE 69
Percent inhibition of PNPLA3 mRNA in the transgenic
mice liver relative to the PBS control

| | | Inhibition | Inhibition | | |
|---|---|---|---|---|---|
| | | measured by | measured by | EC₅₀ | EC₉₀ |
| | mg/kg/wk | RTS36070 | RTS36075 | (μg/g) | (μg/g) |
| 975612 | 5 | 96 | 97 | 1.0 | 8.6 |
| | 2.5 | 98 | 98 | | |
| | 1 | 95 | 96 | | |
| | 0.5 | 82 | 83 | | |
| | 0.25 | 43 | 44 | | |
| 975613 | 5 | 99 | 99 | 0.9 | 7.7 |
| | 2.5 | 99 | 99 | | |
| | 1 | 91 | 91 | | |
| | 0.5 | 82 | 83 | | |
| | 0.25 | 69 | 74 | | |
| 975616 | 5 | 96 | 96 | 1.0 | 9.4 |
| | 2.5 | 94 | 93 | | |
| | 1 | 89 | 89 | | |
| | 0.5 | 81 | 81 | | |
| | 0.25 | 73 | 60 | | |

### Example 8: Effect of Modified Oligonucleotides Targeting Human PNPLA3 in Cynomolgus Monkeys

[0385] Cynomolgus monkeys were treated with Ionis antisense oligonucleotides selected from studies described in the Examples above. Antisense oligonucleotide tolerability was evaluated.

### Treatment

[0386] Prior to the study, the monkeys were kept in quarantine during which the animals were observed daily for general health. The monkeys were 2-4 years old and weighed 2-4 kg. Nine groups of 5 randomly assigned male cynomolgus monkeys each were injected subcutaneously with Ionis oligonucleotide or PBS in a clock-wise rotation between four different sites on the back. The monkeys were dosed twice per week (days 1, 5, 9, and 14) for the first 2 weeks, and then subsequently once a week for 10 weeks with 10 mg/kg of Ionis oligonucleotide on days 21, 28, 35, 42, 49, 56, 63, 70, 77, and 84. A control group of 5 cynomolgus monkeys was injected with PBS in a similar manner and served as the control group.

[0387] During the study period, the monkeys were observed twice daily for signs of illness or distress. Any animal experiencing more than momentary or slight pain or distress due to the treatment, injury or illness was treated by the veterinary staff with approved analgesics or agents to relieve the pain after consultation with the Study Director. Any animal in poor health or in a possible moribund condition was identified for further monitoring and possible euthanasia. Scheduled euthanasia of the animals was conducted on day 86 approximately 48 hours after the last dose by exsanguination while under deep anesthesia. The protocols described in the Example were approved by the Institutional Animal Care and Use Committee (IACUC).

### Body and Organ Weight Measurements

[0388] To evaluate the effect of Ionis oligonucleotides on the overall health of the animals, body and organ weights were measured. Body weights and organ weights were measured on day 86 and the data is presented in the Table below. The results indicate that effect of treatment with antisense oligonucleotides on body and organ weights was within the expected range for antisense oligonucleotides. Specifically, treatment with ION 945616 was well tolerated in terms of the body and organ weights of the monkeys.

TABLE 70
Final body and organ weights in cynomolgus monkey

| | | | | Liver with |
|---|---|---|---|---|
| | Body Wt | Spleen | Kidney | gallbladder |
| | (kg) | (g) | (g) | (g) |
| PBS Control | 2797 | 2.6 | 13.1 | 53 |
| 994284 | 2789 | 3.3 | 14.7 | 69 |
| 975605 | 2685 | 4.1 | 12.2 | 58 |
| 975616 | 2868 | 3.1 | 12.9 | 63 |
| 994282 | 2782 | 4.4 | 12.1 | 62 |
| 975613 | 2704 | 3.0 | 13.5 | 60 |
| 975617 | 2761 | 3.8 | 14.1 | 61 |
| 975735 | 2765 | 4.1 | 15.5 | 67 |
| 975736 | 2844 | 3.0 | 14.1 | 66 |
| 975612 | 2711 | 2.8 | 13.2 | 60 |

### Liver Function

[0389] To evaluate the effect of Ionis oligonucleotides on hepatic function, blood samples were collected from all the study groups on day 86. The monkeys were fasted overnight prior to blood collection. Blood was collected in tubes without anticoagulant for serum separation. The tubes were kept at room temperature for a minimum of 90 minutes and then centrifuged at 3000 rpm for 10 minutes to obtain serum. Levels of various liver function markers were measured using a Toshiba 200FR NEO chemistry analyzer (Toshiba Co., Japan). Plasma levels of ALT and AST were measured and the results are presented in the Table below, expressed in IU/L. Bilirubin, a liver function marker, was similarly measured and is presented in the Table below, expressed in mg/dL. The results indicate that antisense oligonucleotides had no effect on liver function outside the expected range for antisense oligonucleotides.

TABLE 71
Liver function markers in cynomolgus monkey plasma

| | ALT | AST | Bilirubin | Albumin |
|---|---|---|---|---|
| | (IU/L) | (IU/L) | (mg/dL) | (g/dL) |
| PBS Control | 38 | 55 | 0.2 | 4.3 |
| 994284 | 64 | 48 | 0.2 | 3.7 |
| 975605 | 48 | 54 | 0.3 | 4.0 |
| 975616 | 54 | 57 | 0.3 | 3.9 |
| 994282 | 89 | 53 | 0.3 | 4.0 |
| 975613 | 60 | 71 | 0.4 | 4.0 |
| 975617 | 65 | 61 | 0.3 | 4.0 |
| 975735 | 59 | 79 | 0.3 | 4.1 |
| 975736 | 70 | 56 | 0.3 | 3.9 |
| 975612 | 61 | 66 | 0.3 | 3.9 |

### Kidney Function

[0390] To evaluate the effect of Ionis oligonucleotides on kidney function, blood samples were collected from all the study groups on day 86. The monkeys were fasted overnight prior to blood collection. Blood was collected in tubes without anticoagulant for serum separation. The tubes were kept at room temperature for a minimum of 90 minutes and then centrifuged at 3000 rpm for 10 minutes to obtain serum. Levels of BUN and creatinine were measured using a Toshiba 200FR NEO chemistry analyzer (Toshiba Co., Japan). Results are presented in the Table below, expressed in mg/dL.

[0391] The plasma chemistry data indicate that most of the Ionis oligonucleotides did not have any effect on the kidney function outside the expected range for antisense oligonucleotides.

TABLE 72
Plasma BUN and creatinine levels
(mg/dL) in cynomolgus monkeys

| | BUN | Creatinine |
|---|---|---|
| PBS Control | 23 | 0.8 |
| 994284 | 24 | 0.8 |
| 975605 | 27 | 0.7 |
| 975616 | 21 | 0.8 |
| 994282 | 24 | 0.8 |
| 975613 | 23 | 0.9 |
| 975617 | 21 | 0.7 |
| 975735 | 20 | 0.8 |
| 975736 | 23 | 0.8 |
| 975612 | 20 | 0.8 |

### Hematology

[0392] To evaluate any effect of Ionis oligonucleotides in cynomolgus monkeys on hematologic parameters, blood samples of approximately 0.5 mL of blood was collected from each of the available study animals on day 86. The samples were collected in tubes containing K₂-EDTA. Samples were analyzed for red blood cell (RBC) count, white blood cells (WBC) count, individual white blood cell counts, such as that of monocytes, neutrophils, lymphocytes, as well as for platelet count, hemoglobin content and hematocrit, using an ADVIA2120i hematology analyzer (Siemens, USA).

[0393] The data indicate the oligonucleotides did not cause any changes in hematologic parameters outside the expected range for antisense oligonucleotides at this dose.

TABLE 73
Blood cell counts in cynomolgus monkeys

| | RBC | Platelets | WBC | Neutrophils | Lymphocytes | Monocytes |
|---|---|---|---|---|---|---|
| | (×10⁶/μL) | (×10³/μL) | (×10³/μL) | (×10³/μL) | (×10³/μL) | (×10³/μL) |
| PBS Control | 6.0 | 342 | 12 | 3.2 | 7.8 | 0.3 |
| 994284 | 6.0 | 410 | 10 | 2.7 | 6.7 | 0.3 |
| 975605 | 5.8 | 326 | 10 | 4.8 | 4.5 | 0.4 |
| 975616 | 6.0 | 362 | 10 | 3.4 | 5.8 | 0.3 |
| 994282 | 5.8 | 359 | 10 | 3.9 | 5.5 | 0.3 |
| 975613 | 5.5 | 327 | 8 | 2.6 | 5.5 | 0.2 |
| 975617 | 6.1 | 358 | 10 | 3.1 | 6.4 | 0.3 |
| 975735 | 5.9 | 241 | 13 | 5.4 | 6.6 | 0.4 |
| 975736 | 5.8 | 360 | 10 | 3.5 | 6.4 | 0.2 |
| 975612 | 6.2 | 421 | 11 | 5.1 | 5.7 | 0.2 |

TABLE 74
Hematologic parameters in cynomolgus monkeys

| | Hemoglobin | HCT |
|---|---|---|
| | (g/dL) | (%) |
| PBS Control | 14 | 49 |
| 994284 | 14 | 48 |
| 975605 | 14 | 46 |
| 975616 | 14 | 49 |
| 994282 | 14 | 47 |
| 975613 | 13 | 46 |
| 975617 | 14 | 49 |
| 975735 | 14 | 48 |
| 975736 | 14 | 48 |
| 975612 | 14 | 49 |

### Pro-Inflammatory Proteins Analysis

[0394] To evaluate any inflammatory effect of Ionis oligonucleotides in cynomolgus monkeys, blood samples were taken for analysis. The monkeys were fasted overnight prior to blood collection. Approximately 1.5 mL of blood was collected from each animal and put into tubes without anticoagulant for serum separation. The tubes were kept at room temperature for a minimum of 90 min and then centrifuged at 3,000 rpm for 10 min at room temperature to obtain serum. C-reactive protein (CRP), which is synthesized in the liver and which serves as a marker of inflammation, and complement C3 were measured using a Toshiba 200FR NEO chemistry analyzer (Toshiba Co., Japan).

### Example 9: Measurement of Viscosity of Antisense Oligonucleotides Targeting Human PNPLA3

[0395] The viscosity of select antisense oligonucleotides from the studies described above was measured with the aim of screening out antisense oligonucleotides which have a viscosity of more than 40 centipoise (cP). Oligonucleotides having a viscosity greater than 40 cP would have less than optimal viscosity.

[0396] Oligonucleotides (32-35 mg) were weighed into a glass vial, 120 μL of water was added and the antisense oligonucleotide was dissolved into solution by heating the vial at 50° C. Part (75 μL) of the pre-heated sample was pipetted to a micro-viscometer (Cambridge). The temperature of the micro-viscometer was set to 25° C. and the viscosity of the sample was measured. Another part (20 μL) of the pre-heated sample was pipetted into 10 mL of water for UV reading at 260 nM at 85° C. (Cary UV instrument). The results are presented in the Table below, where the concentration of each antisense oligonucleotide was 200 mg/ml, and indicate that most of the antisense oligonucleotides solutions are optimal in their viscosity under the criterion stated above.

TABLE 75
Viscosity of antisense oligonucleotides at 200 mg/mL

| | Viscosity (cP) |
|---|---|
| 994284 | 21 |
| 975605 | 19 |
| 975616 | 20 |
| 994282 | 30 |
| 975613 | 24 |
| 975617 | 22 |
| 975735 | 15 |
| 975736 | 49 |
| 975612 | 25 |

### Example 10: Design of Oligonucleotides at the Site of ION 975616

[0397] Additional antisense oligonucleotides were designed targeting a PNPLA3 nucleic acid that overlap the target site of ION 916333, which is the unconjugated version of ION 975616, and with different chemical modifications and motifs.

[0398] The newly designed chimeric antisense oligonucleotides in the Tables below were designed as 3-10-3 cEt gapmers or deoxy, MOE, and cEt oligonucleotides. The 3-10-3 cEt gapmers are 16 nucleosides in length, wherein the central gap segment comprises of ten 2′-deoxynucleosides and is flanked by wing segments on the 5′ direction and the 3′ direction comprising three nucleosides. Each nucleoside in the 5′ wing segment and each nucleoside in the 3′ wing segment has a cEt sugar modification. The intermucleoside linkages throughout each gapmer are phosphorothioate (P═S) linkages. All cytosine residues throughout each gapmer are 5-methylcytosines. The deoxy, MOE and (S)-cEt oligonucleotides are 16 nucleosides in length wherein the nucleoside have either a MOE sugar modification, an (S)-cEt sugar modification, or a deoxy modification. The ‘Chemistry’ column describes the sugar modifications of each oligonucleotide. ‘k’ indicates an (S)-cEt sugar modification; ‘d’ indicates deoxyribose; the number after the ‘d’ indicates the number of deoxyribose; and ‘e’ indicates a MOE modification. The intermucleoside linkages throughout each gapmer are phosphorothioate (P═S) linkages. All cytosine residues throughout each gapmer are 5-methylcytosines. “Start site” indicates the 5′-most nucleoside to which the gapmer is targeted in the human gene sequence (SEQ ID NO: 2).

TABLE 76
Modified oligonucleotides targeting human PNPLA3

| Start | Stop | | Compound | | SEQ ID |
|---|---|---|---|---|---|
| Site | Site | Sequence | Number | Chemistry | NO |
| 5599 | 5614 | TCAATGTGGCTTCTAG | 995553 | kkk-d10-kkk | 2170 |
| 5600 | 5615 | TTCAATGTGGCTTCTA | 959437 | kkk-d10-kkk | 2089 |
| 5601 | 5616 | ATTCAATGTGGCTTCT | 959438 | kkk-d10-kkk | 2171 |
| 5602 | 5617 | TATTCAATGTGGCTTC | 959439 | kkk-d10-kkk | 2172 |
| 5603 | 5618 | TTATTCAATGTGGCTT | 959440 | kkk-d10-kkk | 1705 |
| 5603 | 5618 | TTATTCAATGTGGCTT | 995696 | k-d10-kekek | 1705 |
| 5603 | 5618 | TTATTCAATGTGGCTT | 995906 | kk-d9-eeekk | 1705 |
| 5603 | 5618 | TTATTCAATGTGGCTT | 996116 | kk-d9-ekeke | 1705 |
| 5604 | 5619 | TTTATTCAATGTGGCT | 959441 | kkk-d10-kkk | 1765 |
| 5604 | 5619 | TTTATTCAATGTGGCT | 995697 | k-d10-kekek | 1765 |
| 5604 | 5619 | TTTATTCAATGTGGCT | 995907 | kk-d9-eeekk | 1765 |
| 5604 | 5619 | TTTATTCAATGTGGCT | 996117 | kk-d9-ekeke | 1765 |
| 5605 | 5620 | CTTTATTCAATGTGGC | 916333 | kkk-d10-kkk | 2173 |
| 5605 | 5620 | CTTTATTCAATGTGGC | 995698 | k-d10-kekek | 1089 |
| 5605 | 5620 | CTTTATTCAATGTGGC | 995908 | kk-d9-eeekk | 1089 |
| 5605 | 5620 | CTTTATTCAATGTGGC | 996118 | kk-d9-ekeke | 1089 |
| 5605 | 5620 | CTTTATTCAATGTGGC | 996277 | kek-d9-eekk | 1089 |
| 5606 | 5621 | ACTTTATTCAATGTGG | 916334 | kkk-d10-kkk | 1158 |
| 5606 | 5621 | ACTTTATTCAATGTGG | 995699 | k-d10-kekek | 1158 |
| 5606 | 5621 | ACTTTATTCAATGTGG | 995909 | kk-d9-eeekk | 1158 |
| 5606 | 5621 | ACTTTATTCAATGTGG | 996119 | kk-d9-ekeke | 1158 |
| 5607 | 5622 | TACTTTATTCAATGTG | 959442 | kkk-d10-kkk | 1825 |
| 5608 | 5623 | TTACTTTATTCAATGT | 959443 | kkk-d10-kkk | 1885 |

[0399] The oligonucleotides were tested in a series of experiments. Cultured A-431 cells at a density of 10,000 cells per well were treated using free uptake with modified oligonucleotides diluted to different concentrations. After a treatment period of approximately 48 hours, PNPLA3 mRNA levels were measured as previously described using the Human PNPLA3 primer-probe set RTS36070. PNPLA3 mRNA levels were adjusted according to total RNA content, as measured by RIBOGREEN®. The IC₅₀ ratios of the assays are presented in the tables below, which is the ratio of the IC₅₀ of a benchmark oligonucleotide to the IC₅₀ of the oligonucleotide. Hence, a bigger value of the ratio indicates that the oligonucleotide is more active than the benchmark.

TABLE XX
Efficacy of modified oligonucleotides targeting
human PNPLA3

| Start | Stop | Compound | | IC₅₀ |
|---|---|---|---|---|
| Site | Site | Number | Chemistry | ratio |
| 5600 | 5615 | 959437 | kkk-d10-kkk | 1.42 |
| 5601 | 5616 | 959438 | kkk-d10-kkk | 0.49 |
| 5602 | 5617 | 959439 | kkk-d10-kkk | 0.36 |
| 5603 | 5618 | 959440 | kkk-d10-kkk | 0.55 |
| 5603 | 5618 | 995906 | kk-d9-eeekk | 1.42 |
| 5604 | 5619 | 959441 | kkk-d10-kkk | 1.66 |
| 5605 | 5620 | 916333 | kkk-d10-kkk | 1.96 |
| 5605 | 5620 | 995908 | kk-d9-eeekk | 0.70 |
| 5606 | 5621 | 916334 | kkk-d10-kkk | 0.95 |
| 5606 | 5621 | 995909 | kk-d9-eeekk | 1.47 |

The application's sequence listing, which the Patent Office published only in electronic form, follows.

SEQUENCE LISTING (2178 sequences)

SEQ ID NO: 1 - RNA, 2805 nt, Homo sapiens
  source 1..2805: mol_type = mRNA
atggtccgaggggggcggggctgacgtcgcgctgggaatgccctggccgagacactgaggcagggtagagagcgcttgcgggcgccgggcggagctgctgcggatcaggacccgagccgattcccgatcccgacccagatcctaacccgcgcccccgccccgccgccgccgccatgtacgacgcagagcgcggctggagcttgtccttcgcgggctgcggcttcctgggcttctaccacgtcggggcgacccgctgcctgagcgagcacgccccgcacctcctccgcgacgcgcgcatgttgttcggcgcttcggccggggcgttgcactgcgtcggcgtcctctccggtatcccgctggagcagactctgcaggtcctctcagatcttgtgcggaaggccaggagtcggaacattggcatcttccatccatccttcaacttaagcaagttcctccgacagggtctctgcaaatgcctcccggccaatgtccaccagctcatctccggcaaaataggcatctctcttaccagagtgtctgatggggaaaacgttctggtgtctgactttcggtccaaagacgaagtcgtggatgccttggtatgttcctgcttcatccccttctacagtggccttatccctccttccttcagaggcgtgcgatatgtggatggaggagtgagtgacaacgtacccttcattgatgccaaaacaaccatcaccgtgtcccccttctatggggagtacgacatctgccctaaagtcaagtccacgaactttcttcatgtggacatcaccaagctcagtctacgcctctgcacagggaacctctaccttctctcgagagcttttgtccccccggatctcaaggtgctgggagagatatgccttcgaggatatttggatgcattcaggttcttggaagagaagggcatctgcaacaggccccagccaggcctgaagtcatcctcagaagggatggatcctgaggtcgccatgcccagctgggcaaacatgagtctggattcttccccggagtcggctgccttggctgtgaggctggagggagatgagctgctagaccacctgcgtctcagcatcctgccctgggatgagagcatcctggacaccctctcgcccaggctcgctacagcactgagtgaagaaatgaaagacaaaggtggatacatgagcaagatttgcaacttgctacccattaggataatgtcttatgtaatgctgccctgtaccctgcctgtggaatctgccattgcgattgtccagagactggtgacatggcttccagatatgcccgacgatgtcctgtggttgcagtgggtgacctcacaggtgttcactcgagtgctgatgtgtctgctccccgcctccaggtcccaaatgccagtgagcagccaacaggcctccccatgcacacctgagcaggactggccctgctggactccctgctcccccaagggctgtccagcagagaccaaagcagaggccaccccgcggtccatcctcaggtccagcctgaacttcttcttgggcaataaagtacctgctggtgctgaggggctctccacctttcccagtttttcactagagaagagtctgtgagtcacttgaggaggcgagtctagcagattctttcagaggtgctaaagtttcccatctttgtgcagctacctccgcattgctgtgtagtgacccctgcctgtgacgtggaggatcccagcctctgagctgagttggttttatgaaaagctaggaagcaacctttcgcctgtgcagcggtccagcacttaactctaatacatcagcatgcgttaattcagctggttgggaaatgacaccaggaagcccagtgcagagggtcccttactgactgtttcgtggccctattaatggtcagactgttccagcatgaggttcttagaatgacaggtgtttggatgggtgggggccttgtgatggggggtaggctggcccatgtgtgatcttgtggggtggagggaagagaatagcatgatcccacttccccatgctgtgggaaggggtgcagttcgtccccaagaacgacactgcctgtcaggtggtctgcaaagatgataaccttgactactaaaaacgtctccatggcgggggtaacaagatgataatctacttaattttagaacacctttttcacctaactaaaataatgtttaaagagttttgtataaaaatgtaaggaagcgttgttacctgttgaattttgtattatgtgaatcagtgagatgttagtagaataagccttaaaaaaaaaaaaatcggttgggtgcagtggcacacggctgtaatcccagcactttgggaggccaaggttggcagatcacctgaggtcaggagttcaagaccagtctggccaacatagcaaaaccctgtctctactaaaaatacaaaaattatctgggcatggtggtgcatgcctgtaatcccagctattcggaaggctgaggcaggagaatcacttgaacccaggaggcggaggttgcggtgagctgagattgcaccatttcattccagcctgggcaacatgagtgaaagtctgactcaaaaaaaaaaaatttaaaaaacaaaataatctagtgtgcagggcattcacctcagccccccaggcaggagccaagcacagcaggagcttccgcctcctctccactggagcacacaacttgaacctggcttattttctgcagggaccagccccacatggtcagtgagtttctccccatgtgtggcgatgagagagtgtagaaataaagac

SEQ ID NO: 2 - DNA, 33500 bp, Homo sapiens
  source 1..33500: mol_type = genomic DNA
gaacactgagttcaagataagaaatgtttataactctgtgctggcagccaagagctggatcccagttgcagatggggctatgcgtagcagtgagagtgggagacacagagacagggactgagagagagagagagagagatgggatcagggataagggcagtactgccaggcactgggctgggtgctttctgttcatcacatttaacttcacaatgcccctcacacaactgttttctcccccatggtacagatataaaaagtgaagctctgagagatgaaatgatgcttgcgagtcttgtgcactggctgtctgatgccaaagcttgcagtctcaaccatgatatcatgtgcctgtcccactggaggctggatggggggctgagagagctggaccatgaaacccttgcccagctgggtcctctctttgtctctggaaagtggggagggcccccagctgctgtctacatgcagtgacgaagagggggtgagtcctcagccctgctcctgtcctgcccacatctgggtcacactggggatgacagatgtccagtgtggctggccaagaatgaatgccggtggacaggaagagaatatgaatgcctgtggctggtggcagggtgactcatctcgggccttcggtcacagcctcaaattcctgtgccagagcctggccctcctgtcattagtcctaagactggtcatgcaatgcaggagggatggatgggtacaggaggctagaggttctgaccccagctgtcccctccagaagcctcagttccgccgcagccctgagcgtgaggtgggggtggagggcagttagggcaggactgtaggtaatgcccctctccagcaaagccaacacgtcaggaatagatgggaccccctgtctgcttctcagctctcctgaccttccccgggacttaggacctgaccctgccttgctctgggcctccatctacaaagtgtctatgtgatgaggcagtcagcccaggtattcactaaggcctgaagctcccatgccctgggattcctgcccagagaaaggaggcagccctgctcccagctcccctacccctccaggcaaggcaaaagcaaggactgcagcagaatggggaagctcagttgaacatgaaccacccaaccaatccaggtgcttctcaggtgacatttggaatcctgacagcaatgtcacctgttttacaacaccaccagtcattctgcagttgaggacactgagccacaaagagggcagaggcctgaccccaaagctcacatactctgcattcctccaggtctcacggagaagggggagggcttcctggtccactccagctgggggcgctatggcccggcagaccagggtcctccagtgaggagctctggaccaaggtctaacttggctccatgtactgctgtgggcttgctccacccagtgccaggggtaggtcaaggtcaaggggcctcttaggcatctcctaagggcatgctactatccaaatgtttgtgtccccactaaaggtcatctgttgaaatcctacaccttaaggtgatgatctttggaggcgggggcctttggaaggtgatttgatgagagggtggcacccttatgaatgggattggtgcccttatcaaagaggcccagaggtgaggatgtggcaagatggcaccttctacgagccatacctctcaccagggaccaaatctgctggtatcttgaacttgggctttccagcctccagaactgtgagacagagaaataagccaggcgaagtggctcacccctgtaatcccagcattttgggaggctgaggtgggtgatgacttgaggtcaggagttctagactagcctggccaacatggtgaaaccccatctctactaaaaatacaaaaaattagtcaggcatggtggcgcatgcttgtaatcccagctactcgtgaggctgaggcaggagaatcccttgaacccgggaggaagaggctgcagtgggccaagatcgtgccattgcactccagcctggggggaaaaagatagaaataaatctcttgtttgtaagcccctccgctttaaggtgttttgttttcgcacctgaacggactaagggactaagggaccaggaatcatccaggcctcagcttcccaaagcactccccactccccagttcctacagggccccgaccccagccccagcacccgtcattcacattttttacttacaaaggaaactttgaaatggacacttcctgttactttcattcaatgaaaaaaatccccagcacttgaaggcaatcatacagaaagcctgcaacaacgcagagagtagactcttcaggtggtggtgcctgctttaggctggctctccccgggtcaaaagggacgtgataaagtgttaaagtgatgttaaggatcaagtgggcaccaactgcgactcccctcccaccccccgacttaacagatgtcaaggaaaacagaaggaagccgtttctctccaggacatgcagtgtctgctggagttttggaaaaatgctttctctcgagtcgctgcggggagctcccaggctggacccccccgcacaggtcctccgccatcgccctcccagcccccgcccccaatccccctcccagacccggtccccgcccccatcccccgccagacgtcgtccccacccccatccccctccaagccccgcccgggagggcgtcctgcccgctcattgggcctcccgccggctcatttgcatggtccgaggggggcggggctgacgtcgcgctgggaatgccctggccgagacactgaggcagggtagagagcgcttgcgggcgccgggcggagctgctgcggatcaggacccgagccgattcccgatcccgacccagatcctaacccgcgcccccgccccgccgccgccgccatgtacgacgcagagcgcggctggagcttgtccttcgcgggctgcggcttcctgggcttctaccacgtcggggcgacccgctgcctgagcgagcacgccccgcacctcctccgcgacgcgcgcatgttgttcggcgcttcggccggggcgttgcactgcgtcggcgtcctctccggtatcccgctgggtgcgtctggggacgctgcccgggctccacgtgcggagtgggtgccccctaggccggggagcgggggatccccaggggtcgcggggccctggaggagcgggcatcggacgcggacacggcggggtgcatcccgagggccccctccgaggcagatgcttcctgcgggggcgctgttcctgggcccgggaagggggcgttggaaccccgagcggtccgggccgaagcctgggactctcgtgcgtccccacccctacccccatcaggcgcccgtgcatgaagggagaccctcacctccggactgagagtcggagcgtctcggagcgacggggagtagggagcgggacccggggcggagggtagtgctggcccctgcggactccgggtcccctgtgtcctctcgggaggggctggacgggctgagctgccgaggggccgatttgccctgggccggacaaagagtggggctttggccggtcccccacggtgggctccttccctctggggattgagggactcaagacaccccgcgcctgcgcttttcttttctttttttctttttttttttttgagacggagtttcgctcagtcgcccaggctggagtgcagtggcgtgatctcaactcactgcaagctccacctcccaggttcacgccattctcctgcctcagcctcccgagtagctgggactacaggcgccagccaccaagcccggctaattttttgtattttttagtagagacggggtttcaccgtgttagccaggatggtctcgatctcctgacctcgtgatctgcccacctcggcctcccagaatgctggggttacaggcgtgagccactgctccctgctgcctacgctctctgggtcgcagcccagccttctgggggctgggtagcctcccagaagggcaaccctgggcatcctccagggcaggctaactggagtctagtggggaggggtaccttgaaagaggaaagttgtttcctcctcctcctcctcctccagtgtttgggacccttcctgggggctggagtgcatccctggacaccccccaatcccatcctcttctctagtttccactgacctaggcccaccctcccctctccggctcagtactcctggaaatgagattccgtacatttgaatcttgtcctaatgaaatatttgtccatgtgggtacctgtgtgtgtgtggtgggggtgcagacggagggtttgtttctcactagctggaactactggggtgtggtatgcttcctgggaatttgtgtgccacagtcctggaggcgaggagggggttgtgagccagtaggcaggggctggggcaagtagcattgtgaagctattgacacccagacgtccccaggcaggagattatgcccccattagcccccttttatctgggcttccttaacaatggactctttgccctgcctgccagagccagcagggagtgactgttcagtggtgaggaagcgggcagaggaagccctgccattgggtaggagcagtgggcagcccctgggctgactgggaggtggggattagggattagacagtcctggctgtctgccttcccctaagccagggggagaggagcaaagggcacgaaatgtggcctccaggaggattagaccgccacatgatcatttgcacaccctggggtttagcaacaataaaagtcagcttttttgtatcccaaggtggcctgtggacacccacatggacaaatgtttacactgggacagaattcaaatgcagaggtcccaggagcctaaagtacactcactctggtatagaaaggattccttactgggcagaggacaggtgcagcctggggctttcccaggcaggacacagggaggctcaggaaccaccaagtccctggaaggtggatctggaggcgttggcaggagccactccctgggttccagggctccaggttcctgctttaaccccctgtctcacagagggctgtgcacttgggggctgctgagcatgtcccagaggctgcatcctggacacagcacctcagtgcatctgagctgaggctaacttggcaggagggacaggcagaacctgccagccacgtgcaattccacccctctggccactcagggaaggagagctgtgagtcaagatcagatttgggtcaggacaggctggggcctgcctgtccctgtgcatcccaagatttatggctggccaggggttgggctgggaggggtggtcttgcatgccaggagagtgcagatcagcctgagaggccaggccagtaagtgaggtcagatctcctgcacctgatagcattaaggccatctacaccaaagctctaatgctgatatgttcctggcctctatgtggggcatggaggtggggcatggaggtgaggcctgctcgcctgggcttctggaagtgggagactcattcctgtggctgaggcctacagcagtgctgtgtggtaggaatacactggaagccatgatgtcattgtgcattttctagaagccacattgaataaagtaaaagacacaggtagaattaatttcattgagcccaatatatccaaaataatatcattttcacatctattcaatataaaaatttactaatgagatatttcatactaagccactgaaatccagtttgtatcttacacatctcagttttgacgagccacatttcaagggcgtgatagccacatgtggctcccatagtagacagtactggtctagagaaatgttggtggcatccttgctgtctggtttctggccttgccaaaagtattaccatcccagtgtggtacattctttcatgtatttgtctcctgtccccagagcagactctgcaggtcctctcagatcttgtgcggaaggccaggagtcggaacattggcatcttccatccatccttcaacttaagcaagttcctccgacagggtctctgcaaatgcctcccggccaatgtccaccagctcatctccggcaaaataggcatctctcttaccagagtgtctgatggggaaaacgttctggtgtctgactttcggtccaaagacgaagtcgtggatgtaagcagtttgcttatctggacgttgtcaagttagaaaagctgttttgggatgggtgtggtggctcatgcctgtcatcccggcactttgggaggccgaagcgggtgggttgcttgagcccaggagctcgagaccaacatgatgaaacccagtctctacaaaaattacagaaaaattagctaggcatggtgttgtgggcccatagtcccagctactagggaggctgaggcaggagaattgcttgagcctgggaggtggaggttgcagtaagtcatgatcatgccactgtactccagcccgggtgacagtgagatgctgtctggaaaaaaaaaaaaaagaaagactgttttgttttggaagcaacacaggcagttgtaggccccctgtgccagagtgacataaactctgtacacctccagtgatttggtccatgtttgtaaaccctgaatgttccagggcagtttcttttcttcactttttatctcttttttttgggtgggggggcggggtacagagtcttgctctgtctcccaggctggagtgcagtggcgcaatctcaacctcccgaggagctgggactacaggcacaggccatcacaccttgctaatgtttgtactttttgtagagacggggttttgccctgttgcccaggctggtcccaaactcctgcacccaagtaatctgcccacctctgcctggcagttacaatttcaaataattcctccctttccttcaacacttggctcatgaccgtccagtccaaggaacctgtcctgcaggtgtgcctctcccgagcttcctctatgcatcttccataatgaagatgccttctcactggaaaccctacaagggtgggaacgtgccttatttgcctgtatcctcagggtctagcagagagaagataatttgtaataccaaaacaccattaaattcagctgatgctttcataagcgctccttggaggaaggactccatttacttgacagatctgtgcaagacagcagcctggcgcgtctaacctgcagccagttgcatcctctgtttaaccttgtttgcggaagctttctctaaacagccagcacttgtctgttcccacatgggtccgttctcccagtgaatcaccgtggtgcctgctgactgctctgtagcacagtgcttcgcaaagtgtgatcctgggaccagcagagcagcagctcctttgagcttattggaatggcagaccctcaggtcccacctctgacctgctgcatgggaattctggggagggacgcagaatctctggttccacaggctctccggtgatgctaatgaataccggcatttgaacagcaccgatctagcccctttcagtccatgagccaacaacccttggtcctgtctgtggtgacccagtgtgactctcatggggagcaaggagaggaagttgaagttcactgacagggttgttaaggggattatgcaatagatgagacccatgggcctgaagtccgagggtgtatgttagttccccgttcttttgacccatggattaacctactctgtgcaaagggcattttcaagtttgttgccctgctcacttggagaaagcttatgaaggatcaggaaaattaaaagggtgctctcgcctataacttctctctcctttgctttcacaggccttggtatgttcctgcttcatccccttctacagtggccttatccctccttccttcagaggcgtggtaagtcggctttctctgctagcgctgagtcctgggggcctctgaagtgtgctcacacatctcctgcctgcagggcactggtgtcgggcacctcagggtctgtcccatggtggagccccatgcctcactgcctttcagacagagtagccacagctggccctatttccaggctacccgggcagcaaaacttactgcatgtgtaattaattatttggctatctgtaaggtaaactggctggttcacttaatctgcaccttaagcatcagatagcttctcagtgatctagttaaactatatgatgttggccaggcgcggtggctcatgtctgtaatcccagcactttgggagcctgaagcaggcagatcacttgaggtcaggagttcgagaccagcctggccaacagtgtgaaactctgtctctcctaaaaatacaaaaattagctgggcatggtggtgtgcacctgtaatcccagctgctcgggaggctgaggcaggagaattgcttgaacttgggaggcggaagttgcagtgagccaagatcgcaccactgcactccatcctgggtgacagagcgagactctatctcaaaaagaaaaaaaaaaaaaaggtaaataaagtatatgacactgaagaatctgttacccctggaaggtggagctttactcttagggggaactataacagtcatatatatatatttttttcttttctttttttttttttttgagatggagtctggctctgtcgcccaggctggagtgcagtggtgcaatctcggctcactgcaacctccacctcacaggttcaggcaattctcctgcctcaacctcccgagtagctgggattacaggtgcctgccgtcacgccaagctaatttttgtatttttagtagagacagggtttcatcatattggccaggctggtctccaactcctgacctcaggtgatccgcccgccttggcctcccaaagtgctgagattacaggcgtgagccatggtgcccggccaacaatcacatgtgttgtaaacaacaacaaaaatctgtcagcctggtctaacctagatttgtgctttgttttgttttgccactttgtgatgcacaggaggaagtttaggctgtaaaatactagccttttagggtaatttttgaactcacaagagcagcagcggaacctttgatgcaatcctgtatgtagcaccagcagagccacgtggcagagggactcgcattaggagcctcccattacagactacgtgctcctgtgcgttatcttatagggtccccacaaccaaggggagatgtgattattcatcctgtgtggctgtggggaacttgagagtcatacttgcccaaagagcacggccagcgagcttgcacccaggtcactctctgctcctctgtcagaacagggcatgtcttggttcactgcagggcggctcttctcattctctgtagtttggggtccaggatagtggtccacggagccactggagtgcccagctactgagtgaccaaagcatattttggatttccgacattgccacagcatggttgggcatcagcaggaccccaaccccttgttatgctggtggctttatgtggttatttgatcttccccagaactcagcaggagtgcacccagcagcaccgtagtgatgctctctggctccccagtgcacggttctggctttccttcctggtcgagagtttcaagccctctgggtcctactctgtccttttcagcccatagctttgttcaaaagctgctggcagtgttcagatttggctgagttcagtgaatatgtgcattggctgatttctgagccatgccagggggatggagaagccgaagcaggagtgtttgttctgcaggctctggagtaggcattgggtctgtgccggctcacttgctagtcttgcatccttccccaaccccctctggggatgtctggccacatcagaagacagtttgggttgtcagaactgggggagtaccaggccgaggtgggtggatcatgaggtcaggagatcgagaccatcctggctaacacagtgaaacctcatctctactaaacatacgaaaaaaattagctgggcgtggtggcgggcgcctgtagtcccagctactcgggaggctgaggcaggagaatggtgtgaacccggggggcggagcttgcagtgagctgagatcctgccactgcactccagcctgggcaacaaagcgagactccgtctcacaaacaaaacaaaacaaaacaaaacaaaatctgggggagtgccactggcatctgatgtatagaggcccgagatgctgtgtcatcacccgttgagtgcgctcataggcatcttcctgacaattagaacccattattcttcaaattcaatgcaagcaaattcaaagcattactgtgtacataccgcatgctaatcaattgcaccactggagctcctaaattcaaaacattactataaaaaagttcaaaatgcatggaaaagttgtacatggcaggagaatatttgggcttctgactaccccttgaatgaagatgatccaccagccgccttcctccttggtcttcactccagattcctagcatttcattctgtgtctctttatgcagtgaggtttttgtttgttttttgagacagagtctcactgtatcacctaggcctggagtgcagtggcgcgatctcagctcactgcaaccctcggctcctgggtttaagcgattctcctgcctcagcctcccgagcagctgagattacaagcacacatccccatgcccagctaatttttgtatttttagcagagacagggtttcaccatgttgcccaggctggtctcgaactcctggcctcaagtgatccatgtgcctcagccttccaaagtgctgggattacaggcgtgagccaccatgcccagctcctagtgaggtttttgatgccttgctacatctgccctagaaattgtgtgactacgattttggaaatgttgctgtgtaaacttgtgatcatttctggactccaggcaagaatcttgatggctaaggtgtggctgaacatgtctgattctctcctggacctgttttaggccaaactctgctctgaaattcctccgtgtggaagggcgggctggggagagcctcccagctggaatcttttggatgcctttctctgtgggtatctgatggctggctctgatggctggctgtgatggctgtggctggaaatcattgttgacatgagtttcacagatgcaggctctgtccaaattgtagcaaaagctgcctgccccagccgagctatgggcaataaggtggtttaaggatatagatgaaggaaaactcacccttagaataatttatccaaaatgctgctgtgttgtgggttagaggacattttctgaggtcccaggttcattgtttcatttaagtctcaaaagtccctccaggtgttggttctaattgtcaaagcatggggggagatgggctcatgggttaaaggtcttatcccagatttctgtatcctccttgcaagcagcaaaggggtctggatttgaatccatgaccatgtttctcctttgggtttccatcacactctgtccccgtgcactgagcaccctttagttcatatgacccccttaggcatgttacatgggcactcctataggtgcccatctggccctaggacttggccaacacaacatggactccagtttccatctgcctctttgccaggcacttttgtgcagtgcacacactgtacaacagtagacggcaaccctgagagccagagtagagcctgtcctagcaccggaatgctcggtaaggatttgtcgcaggagtgattccaaagccaatgtcctccctccatatcagcctgtttgtggctctgagaagctctgcccacatgtgaaagcttgttaagcacttaagcactaacccagagcttcagacagtgccagtcctttttccccttctttaaaagcgatatgtggatggaggagtgagtgacaacgtacccttcattgatgccaaaacaaccatcaccgtgtcccccttctatggggagtacgacatctgccctaaagtcaagtccacgaactttcttcatgtggacatcaccaagctcagtctacgcctctgcacagggaacctctaccttctctcgagagcttttgtccccccggatctcaaggtgagttggtggtgagggggcaggtgttctggggtgcagctcttctttgcctccctgattgccaggagctaccagttactgtctgcacaatcaaacagaaatagacctgtccttgatggttaacggaaataaaaggcgcttgtcccagaagctcaggtgaggcaccaccctgattatgggaatcacctgggaacatatacccagacctaaaactcagatccacttcccaggctgtggttatatagtcaggggggtgcagtatgggtattaggattttttattttttagttataaagatttttttttggtttgtttttgagacagggtcttgctctgccgcttaggctggagtgcagtggtgcaatcatagctcactgaagcctcagactcctgggttcaagcagtcctcccacctcagcctcctaaggagctgggacccacaggcatgcagcaccacacctggctaatttttaaaaattttgtggagtgttgcccaggctggtctcacactcctggcctcaagcgatcctcccaccccagcctcccaatgtgttgggattacaggcatgagccattgtacccagccactaagatgattcttatttggaaacacggtcaagaacaactgcgttcggtagtttaaccttttttgattgtggtggttttagtatgccttaccactctaccatagtaagaaatttgcagaccatgtacaccaacctttggtgctcctggggagaaagaaagaaggctatgcaatgcaatgcatgctcacagtccaagggagagggaaagctgtctaacaggattggttttcccgtgtgctttataagcagatgagtagaggagacagctcttattgtcctagtggcaattgggataggctgcaaagtttgttagggtggaggcttattccgggaccaagggagcccaaagaaacaagctcctgccaggcgcggtggctcacgcctgtaatcccagcactttgggaggctgaggcaggtggatcacctgaggtcaggagtttgagaccagcctggccaacatggtgaaaccccgtctccatgaaaaatacaaaaattacccgggcatggtggcgggcacctgtaatcccagctactagggaggctgaggcaggaaaatggcttgaacctcggaagtggaggtggccgttagccgagatcacgccactgcactccagcctgggcaacagagcaagactctgccttaaaaaaaaaaaaaaaaaaaagaaaagtaaaaggaaaaaaaagaggctctggcctgctggggtgcctgcaaagtctccgtggaagggtgacattcaagccgagacctccagggaactgtctcctgggagcacagagccctttgctcagcccccaggtggctcagtgcccccagccagcagactcagagcttgcatgattctttggtgctctctgcggtcttccaatgatgctgaaataaatggtgcttggtgtctccctgctgtagtccccttgcttgctttgctcacaggtgctgggagagatatgccttcgaggatatttggatgcattcaggttcttggaagagaagggtatgtatgggctgggaggatcagccatgcccttttgacaagcatttactagcggtcttggtaaagacttgagatttgccttagttctaacacttagtgcccaacgccttccttgtgttgctcaacctactcatgagcccaggagataggaaatctccgtcccattgtacagatggggaaacagaattttggaaaggagagccaagcagcacacacccctccctgaggggcagagccgagatttgaactgggatgtcatgactccagggccctctccctccccagggtccccttatctgaaggcggtttttctttccagctcgacctcttgtgacccttagtttaacaagggccgaagttaaagagtttctgcgcctggaccccaaatgaagcaatcagatttctcatctccagtcaggtgtgggtccaagcccactagacaagtttgctcttcccagagcacatttctgccttcaagtcatcctggcttgtcagggctgggggagttctgctgtagaaatattagagtggaaggaaaaagatgtgttgggagctatttttctttaatactaaaagttggttgatgaatttgtcgttggccaagaccaaggagactgcatttttaaggacatatgtgtatttatctgctcagaaaatgttcattgctgtgtgctagggatactgcagtgaacacagaggtgtgacccttgccagccttgtgagagaagtgagcagataagtaagcagaagggtgatgctgtgtcgatgggaaagtacaggtgccaatgagaaggcacaggtgtcaaggagaagacacaggatgctggaggctcatgcaggatggatctccaaggcccaggggaagaagggcctctcggaggacgtgaatccacattaagactttggggataagtaggagcgccttaggcatggggacccatggatgcgaggcctgtaggacacagacaggatggcatgaaggcctgtgcaactggaggggtggggatggggacactaagagatggctggaagtgtgggggtggggacactaagagatgactggagaagagggggtcaggagtggtgaaaaatgggagaggagggcaggctgggccttttggatacagggggattgcatcctgcagtggtagggagccactgagggctgctgcagtaggagtgaggggatcagaggagagctttggaagccccctggatgcgggacaggaagcgagataccagtgtctaggaggccagtgaggcagccacaggctccaccaggatcagggctgcgagggtcatgaggaggaaaccaatttgaaggagtccaggggaataggacttggaaatgaccgatgggacatttgggaagaggaagacagaagagcgcagtcccggcttctggctttagcagttgggcaaggggagatggggagatgtgcccatgggttgagggttgaggacattaggagggagccggtatggcaggaagagctggtgtgccagagatgctggaagcagcatctgcctgagaacagatacctggcaatattcctaagggaaagtgacatctcggagggtgaggagggcatctgatagggcctggaaagagccggggcaagcatgaatgtgaggttatcttggggggcaaggctcaggcgttgaggagcagcccctggtctcttcagcctgaagttggaagccagagttgggccaggtgcagctgtggttgtctgaagtccccctcccccagcccagtgtgccaatgctgtaagagcaagggccgctcactggtgctggtggctgagtcccagcacccaggacagggcctggcacatactggtgcccaatcctcccttctgggtgcttcttccaaggccttgtgatggaagtgagtaccctcttcgacatcagacccagcttcaaatcctggctctgctatgtattggctgcgtggctttagacaagtcttttaaccttgctgtgcttctgatttctcagctgaaaaatggagatgatgatagtggtttctgtaaggccttatggtgaagcacctagctcagggcctggaaggcaggtgtaaccagtggttcagttgttataaaccaacactaaccctcgcctttgcacctcatgaaaccagatatgtagatggagcccacaaagctagcaggagccaagctcacgtgtgtcctgctttaaagccccatacccctttctccgggtgacaaacacctgtgctcgttctcttcccttcccctcttccccttgcatttggctaataacaggccagctgcctgcctccctgcagtttggtagatgggtgggtaacgaccaccactcccacgttcgcctgatgggcttgttttccgtgcccttcacaggcatctgcaacaggccccagccaggcctgaagtcatcctcagaagggatggatcctgaggtcgccatgcccagctgggcaaacatgagtctggattcttccccggagtcggctgccttggctgtgaggctggagggagatgagctgctagaccacctgcgtctcagcatcctgccctgggatgagagcatcctggacaccctctcgcccaggctcgctacaggtacccactcctcggggtgagcacgggcagcaccttgttttctttcttgtgcattatggaggaagatggtactgccacatgggagcgatagggtgaggcaaccatgacaggtggttgggaacatctccttccatgtgtacagcctgggctgctgccatcactcccagcacagcccccaacccccccaatcctggaaccttgccaagtctcccttcccatggggtcatgaccaggaggaaaacaaactccagctgagccccttggggttccccatataggctcctgcctgtggcagctgggccctctgtacccctttccaactctgtctccctaacatggcacctgagctcctgccatcctggatttcatggaccccaaggatgggggtcctgcatctgggacttggcctattactcggagctccttttcagccgcctccctccacctgtccacccacctcaaggctcctttcttgagacctctcctaatttctcccttcccctaaacccacaattttgaacctccatcgaatggtgctgtattttataatgtcatcaaatatcaaatggagacagtgctatggtccaaatgattgtgtaccccccagaatttgtcttttgaaatcctaacccccaacatgatggtcttaggaggtggggcctttgggaggagattaggtcatgaggaaagggctgtcatgaatgggattggtgcccttattaaacagacccaagagaggtcccttgtcccttctactgtgtgaggactcagaaggtggtgtctatgaagaagcaggccctcaccagacaccaacatgtctgctgccccttgatctgggaccttgcagcctctagaactctgaaaaatcgatgtttgttgttttataagccactcagttggtggcattttgttagagtagcctgaacacggactaagtcaaacagaagaacccacaaaccagctacagagttgggcatttggagaaattcaaaaatgagtcagacataactccttattcttgaggtgccctaagagatgggacacagcagctgcccaggtgcattagtttgttctcacattgctataaagaaatacctgagactgggtaactcataaagaaagaggttgaattggctcacagttgcacaggctggacaggaagcatggtgctggcatctgctcagcttctggggaggcctcaggaaacttacaatcatggcagaaggtgaacgggaagcatgcacatcccatgactggagcaggagtgagagagagagggaaatagagggaaggtgccatacacttttaaacaaccagatctcatgagaacacattcactatcaagagaacagcaccagtggggaaatccgcccccatgatccaatcacctcccatcaggctccgcctccaacactgggaattacaatttgacatgagatgtgggcagggacacagatccaaaccatatgaccagattaatacgatttgaggcatcacgaggtcattaaagagagggaataaaagactggggctccaggaagaaggctctggaatccagcagagggtcaaggaccagcttgtaaagctggtggtgcctgagaagtacctaggagaacatagatgctgtgacgtttgatgtagctgttttttgttttgtgttttggtttttgagacagagtctcactctgttgcccaggctggagtgtgcagtggcgtgatcttggctcactggagcctccatctcccaggttcaaatgatcctcatgcctcagcctcctgagttgctgggattacaggtgcacaccaccacgcctggctaatttttgtgttttcagtagagacagggtttcaccatgttggccaggctggtcttgaactcctgacctcaagtgatccaacaacttcagcctcccaaagtgctgggatgacaggcatgagccaccatgcccagcctgatgtagctgtttctgtgcacattatttgctgtggggtatattcagatttcttaatacaagatgattctttgcctcatgacttacacaccattttctatttaatttcagctatgatattggaaatggacatgtcttttcaaggaaaataaaagcaggctttctggaatggcgacttccaaacatatttgtcaatttaaaggagctgggagtggggaccctatgctccgtaagcactctcttagctgttcttggctgtgctccccgcttcagcttcacactgcccttgctgtgaagggagcagcctgggccgggcgcggtggcttacacctgtaatcctagcactttgggaggccgaggtgggtggatcacctgaggtcaggagttcaagaccagcctggccaacatggtgaaactccatctctactaaaaatacaaaaaattagctgggcatggtggcaggtgcctgtaatcccagctacttgggaggctgaggcagaagaatcgcttgaacccaggaggcggaggttgcagtgagccgagattgcgccattgcactccagcctgggggcaacaagagcaaaactctgtctggaaaaaaaagaaaggagcagcttggcaaaccccaccttgtcgcttttgtgagtgcctctgaccctttggctgccaggacgggcgtattttatggaaatgctaagcaccaacagagtaaagtggtttggtttttcacagtggtgggagataatagctccaaattgtctttttcagcactgagtgaagaaatgaaagacaaaggtggatacatgagcaagatttgcaacttgctacccattaggataatgtcttatgtaatgctgccctgtaccctgcctgtggaatctgccattgcgattgtccagaggtgagcattttaggtggctccgtgtcttcctcacagggttgatatgaggatgaaacaagatgatagatcatggtggcatgtagtctgggacctggattgtcgtgccacagatcacagctcacagtctatgtgcaatgcccctgaatgttgcccacctgtcctcaagccacacatgcacctgtaactcagtgcaagcccagaaactccccgtggggactcctagagctgtcagtggcctcacatagcagctggtccagtctcttgtgattgcccaaggaaactgaggcctggagagcttggggtcactgctctgaggccatagagatgcctagtagaagggccaggcctagaagcaggatccttgctgcccctctgagctgtttccatttaaaatcacatgaaggccggcgccgtggctcacggctgtaatcccagcattttgggaggccaaggtgggtggatcatgtgaggtcaggagtttgagaccagcttggccaacatggtgaaatgccatctgtactaaaaatacaaaaattagtggagcatggtggcacgtgcctgtactcccagctacttggaaggctggggcagaagaatcgcttgagcctgggaggcagaggttgtagtgagccaagattgtaccactgcactccagcctgggtgacaggagagaaaccctatctcaaaataaaatgaaaggtaatgaaatgaataaaataataaatcaagtcacggccgggcacggtggctcacacctgtaatcccagcgctttgggaggccgaggtgggtggataatgaggtcaggagttcaagaccagcctggccaacatggtgaaaccatgtctctactaaaaatacaaaaattagctgggcatggtggtgcatgcctgtaatcccagctactccggaggctaaggcaggagaattgcttgaagcaggacctaggaggcggaggttggttgcagtgagccgagatcatgccactgcactctagcctgggctacagagcgaaactccgactcaaaaaaaaaaaaaaaaaaaaatcaaatcacatgaaagtagaacatagggaattccatctttcgttctaggcatagtttgttaatatgattcagagccagcagttaggagaacacagtgtgactctcctagaacttcttgattgggcttcctctgattgggtttcctctgattgggcttcctctgaaagtgggggggatggggggtggggagcagaatggtcagagcttggctcagcagtcagactgctcttcttcaaatcctggctgcattgcttactacagctgtgtgactccagatgactgaatccacctctctgtgctgcagcttcccgtctagagagatcacctggagcagagggtggtcaggagactcaatctggttactgactcacagtgcaggagtactcatcccatagtaagcatccagctagagatgttgatttctattttcaggtaataatgatgatcgtaaaattagagacagataaaaggtatgggcattaggccagggcactgcaatttctaagctgtgtgacctcaggcaagttactcgacttctctgagcctcagcggtttcatccgcaatatatggataggaaaaccgacctcagtgggttgtctgacagtggagggcacttgattaaaaaaaaaaaaattaccctggtctgaatattaccctggactgaaagaaaaatattgagctaatacaggcatcaggaatggggctgcagggagtccagggaagggagaacgaagagcctgaaggtgtgaggaggtgcgagtgctgatctgtctgctacaaagaggctgctgagcctcctgtggatgtggccctggacttggcagtttaatacctgagctgttaaaataacctcagatgctgtgttctttaaggggtaggattcagattcctgctgaaatgcttctgaaagggagggaatgagccagcccatccccagttgctttttaagatcattgggaagttctggtcttgccatttgtccctggaccactcttaggtcctcctgccccacttccatctgggtgtgtgccctgggctgtccaccacacagctacatcctgccatcttccctcctggagccactgtgccatgcatggatctgtagcttcatttttcttggcttttccctggtttttctggagcagagtctctagtaaactcccaaggaagaaaacgtttgactttatgtgtgttgggaaacgtgctttttttctattacatctcagtgataggttggccatgtctagaattgcaggttgaaaatcatttcctctcagtatattggttagtgagaagcctgggactgagacagtcacattctcacttctttgcaggtgagtgctcttaggactgtctttttatcccttatactctgaaatgtcatatgtcttggtgtaagtccttatttcagttattgagctggacaagtactggagaccccttcagtcaaagccttctgtcattctccagctctaggaaattatcttctattgttatttctgttattccttcccttccattttcttttttctttttttttttttttttttgagacagggtcttactctggtgcccaggctggaatgcagtgacctgatcatggtacactgcagcctgaacctcccagactcaagtgatcctcccacctcaacctcctaagtagctgggactgcaagcacacatcaccacacccaacaaatattttttaaaaattttgtaagatgggatcttactatgttgcccagactttttcttcctcttcctggggctcttattaggaagatgtttgacttcctgggttggattcctgtctccgtgtctgactttctctctttgtcatatttttcatcactcgttgtctttttgcgtctgctctgacagatttcctcaaattttgtcttctagtcctatcctacagtttttactttcagcaaatataatttaatctccaagagtactctcttgttcttttttcttagcattctgttcttgttttatggatgtaacattctcttggaatatttgctgtcctctagatcatcccttctccatttcttcttgggctagtttttctgtttcttcatctttctcttttatgctacttattctgggcgtgttcttggtgggttttttcccatatagcaacagaggacttggagctcagggagaaaagggtaggtgcatcacctggcagagctcccagacagtgacaggcaggctgcgggaaggatgtctacttggcggtgctaccgctttcctagaaaccctttccctggagctggttgaactgttgggttttgccctggtggtgaacgctggctccccgtgctctgcctgtttcatcaccagccccctccccttctgcctggggtccagtaatctgttgaaatatatatcttgctcattggtgagctcctgctccttcctcgttgctcttgcagatttatcacttctcgtaaggctgcgcttgtacttcgggattttctctgtgccacactgggaaacatagggtggttgcatgctgcagtcctgagcacttatttcactcacatctttacacgaagatttggtgggtgtttactttgtttttagtaagttagtctgtcatgtcctttgatcctttttttttgttttttgagatggagtctctctgtgtcctccaggctggagtgcaatgtcgcgatctcagctcactgcaacctccacctcctgggctcaagagattctcctgcttcagtctcctgagtagctgggattacaggcatgtgccaccacacctggctaatttttgtatttttagtagaggtggggtttggcatgttggccagcctggtctcaaactcctgacctcctgacctgcctgccttggcctcccaaagtgctgggattacaggtgtgagccaccacacctggccctgattaatcttttaatgcccagtctctccttcaaaagccggctcctttctctccctcgccttcctagattccttctccactccccaggatcagcctcctcctccccaccccaccactgccggggggatgtctgtggtcaggcatttatcagagaccctgaggtgggggtcctttatgtgtctgggggatggagagtctagaggaggtagcgttcagacctctccatggtgcctctgctgggctcacatgtgaccaagcacagcaaaccatgaggcaggggatggtcttgaccatgagagcccttgcagcagctgccatgggcctcagctcctctccaagctgggaagagccctgaaaagccaaggtgtttttttttccctctttatttcagtgtaagtcccttgagctttcttgaaccagaagtgggctcattttgctttagagatttcaggtgggcttgtccttgtcctagcatcccagatccaccttctgggaagtcatcagattggaggtgatgttggcagcttttgtaaacaaagggtagtgttgtaagctgttgtgtctgcctatgtgtgtgtttgtgtacttggtctcatctctgcagactggtgacatggcttccagatatgcccgacgatgtcctgtggttgcagtgggtgacctcacaggtgttcactcgagtgctgatgtgtctgctccccgcctccaggtaaatactttggctgtgggtgtgtgggccggacgggcacctctctcatctgatgaggcctcacacgacattctagaaacagctggctgaacaccaagcaaggagcttgcccttgggtgtggggaccctgtctcatgggaggcagctgagtcagtcagaggtcctggcacacctgctgagagctgccacccaggccaacctgaaccggagcctgggaagacttcccgtcggatgagtctctttgagtgcagcattgatggtggaagagcagagaggccccagataagcagggaaaggtgcttcagacagagtggctgggatgaggactggggagtgtcagatagcgctggcgtgtctgagcgaaggagctctggcacccatggcacaggaaggaggtgggaccctggaggggcagggctagcagagctcctcggagcgtgtggctaggtgcctggtaatgcaagccccctgtcctccaccctctgttgtactgagtcacagtctccggggtgaagcctagcagtctgcgttgacaggccccaggggatgccgctacttcctgaattctgaattctggaaactgagccggagttcagggcctggctcccattaccagggttgggcgttatcctgaaaatcataggccttggtttcctcacttggctaacaggggtgatccccatcccctcaatgggtttccgtgagctcctgagagcccgtagcatggtacttggcacatgctgggcatcaggaggtatggcctctcttgctattgttgttattggtagacacagaaggatttaaaagtaggggaatgcaaagatccgatttgctagggaagagggcagtagtggccaagtagagggtggatcctgggccctggctggcagcaggcagcaaggggggctgccagggcccaggcagggacgatctgtagaccgagaggcttcctaaggctcttggacaggaggaggtgtcggttccaagcctaaggagtggggcagccctggtgactggtggtcagtggtgccaggcggtgggtggtaggacaccctggcaggcaagtaggtttgtgtgggggaaactgataggcccctccagggattcgttggtggacaacacctgtgatgtccagtgggaggtgtccaggtagctgggagggccacaggcttggaagacctaggtggtgacatcagcccagcactgagggctagaagaagctgtgtctctggctgtgacggcaccctagagtgtgtgtggtgccctctactggccggcaatgtgggtccaccgtagctcagactgcacactgcagcagcgggaacggcctctaagccaacttcctccatgtgtttcaggtcccaaatgccagtgagcagccaacaggcctccccatgcacacctgagcaggactggccctgctggactccctgctcccccaagggctgtccagcagagaccaaagcagaggccaccccgcggtccatcctcaggtccagcctgaacttcttcttgggcaataaagtacctgctggtgctgaggggctctccacctttcccagtttttcactagagaagagtctgtgagtcacttgaggaggcgagtctagcagattctttcagaggtgctaaagtttcccatctttgtgcagctacctccgcattgctgtgtagtgacccctgcctgtgacgtggaggatcccagcctctgagctgagttggttttatgaaaagctaggaagcaacctttcgcctgtgcagcggtccagcacttaactctaatacatcagcatgcgttaattcagctggttgggaaatgacaccaggaagcccagtgcagagggtcccttactgactgtttcgtggccctattaatggtcagactgttccagcatgaggttcttagaatgacaggtgtttggatgggtgggggccttgtgatggggggtaggctggcccatgtgtgatcttgtggggtggagggaagagaatagcatgatcccacttccccatgctgtgggaaggggtgcagttcgtccccaagaacgacactgcctgtcaggtggtctgcaaagatgataaccttgactactaaaaacgtctccatggcgggggtaacaagatgataatctacttaattttagaacacctttttcacctaactaaaataatgtttaaagagttttgtataaaaatgtaaggaagcgttgttacctgttgaattttgtattatgtgaatcagtgagatgttagtagaataagccttaaaaaaaaaaaaatcggttgggtgcagtggcacacggctgtaatcccagcactttgggaggccaaggttggcagatcacctgaggtcaggagttcaagaccagtctggccaacatagcaaaaccctgtctctactaaaaatacaaaaattatctgggcatggtggtgcatgcctgtaatcccagctattcggaaggctgaggcaggagaatcacttgaacccaggaggcggaggttgcggtgagctgagattgcaccatttcattccagcctgggcaacatgagtgaaagtctgactcaaaaaaaaaaaatttaaaaaacaaaataatctagtgtgcagggcattcacctcagccccccaggcaggagccaagcacagcaggagcttccgcctcctctccactggagcacacaacttgaacctggcttattttctgcagggaccagccccacatggtcagtgagtttctccccatgtgtggcgatgagagagtgtagaaataaagacacaagacaaagagataaaagaaaagacagctgggcccgggggaccactaccaccaatgcgcggagaccggtagtggccctgaatgtctggctgcgctgttatttattggatacaaagcaaaaggggcagggtaaagagtgtgactcatctccaatgataggtaaggtcacgtgggtcacgtgtccactggacaggggtcccttccctgcctggcagctgaggcagagagagagaggagacaaagagaaagacagcttacgccattatttctgcatatcagagacttttagtactttcaataatttactactgctatctagaaggcagagccaggtgtacaggatggaacatgaaggtggactaggagcgtgaccactgaagcacagcatcacagggagacagttaggcctccagataactgtgggcgagcctgactgatgccaggccctccacaagaggtggaagagcagagtcttctctaaactcccccagggaaagggagactctctttcctcgtctgctaagtagcgggtgttgttccttgacactttttgctaccgctagaccacggtccgcctggcaatgggcgtcttcccagatgttggtgtcaccgctagaccaaggagccctctgatggccctgtccaggcataacagaaggctcgcactcctgtcttctggtcacttctcgctacgtcccctcagctcctatctctgtatggcctggtttttcctaggttatgattgtagagtgaggattattataatattggaataaagagtaattgctacaaataatgattaatgatattcatatataatcatatctaagatctatatctggtataactattcttgttttatattttattatactggaacagctcgtgtcctcagtctcttgcctcagcacctgggtggtttgccacccacaattttccacatgcttctggtctgcgttctttttttctccttgcatcttctcattctctgatcaccccaacctctctctgtcttccctactctgccagccttgatggagacaagcccttgagaccagaactcaccttttccccaggtgtgataatctattagcaaggtcagtgtaatatgactgacggtgaaacgtgtatttttttctatttatgcatttgagtacagtacgtacaagaaaaataatggtgtgctcaaactgttaaatgttggaaaagaaagatacaacccttacccatattgtgtaagtgccctggagtagaagaaccagcaagctcagacaaagcacttgactgagaagacagaccctttaaaggaaacgggttctagggacaaactctacgtgggcctgttctcttgataagaccgtgaactctttgagaaaagaggctacttgtgaaaataatgagcccccttcggggcaggagttccggggtttgaacctgccttcttacatcttgagggctaagtgagttcccaaggcctctgttcagtggttgctccgtcagtgagctcaggtctggtgagtggcagggtcttccacccccaaccccaccgggtgtcagagcaagacactgtcccccatggagctggaatggggtggaggagcccacatctggcacccacgtggcctccttgtgacggacccacccttgcaatgttggaaaggaaagttacaagtttcttttcccaagtttcccagtaggctttgttctgttagcttcacgccttcggtcattagcagacataaataaactttaaccattgttttttatcttttttttttttttttgagatggagtttcactcttgttgcccaggctggagtacaatggcacaatctcggctcaccacaacctccgcctcccgggttcaaacgtttctcctgcctcagcctcccaagtagatgccaagcctcccaagtagatacaggcatgtgccaccacgcccagctaattttttgtatttttagtagagatggggtttctccaggttggtcaggctgatctcgaattcccgacctcagatgatccacccgcctcggtctcccaaagtgttgggattccaggtgtgagccaccacgcccggccaacagtattttctaataaccagtatatttccatatacatgtgtacatgggtattgtgattgttatcaggaaaaaatatattaaatggctgataggagaccatgggacgtattttctttctgcttttaaaaattattcaggccgggtgcggtggctcatgcctgtaatcccagccctttgggaggccaacgtggacagatcacctgaggtcaggagttcgggacaagcctggccaacatggtgaaaccctgtctctactaaaaacacaaaaattagccaggtgtggtggcaggcgcctgtaatcccaattagtgggttggctgaggcaggagaatcacttgaacccaggaggtggtggttgcagtgagctgagatcgtgccactgcaccccagcccgggtgacagagtgagactccatctcaaaaaaataaaaaataaaaaataaaaaataaattattcaatcttctttatttttattgttttaatgactaaagttatttttagtagaaacagggtcttgctatgttacccacgctagtcttgaactcattggcttaagcagtcttcctgccttagcctcccaaagtgctgggattacaggcatgcctggctcctccaccttcttaaaataagcatttgttttataattttttccaagtgtgtatcaagataaggaaatcaggaagtgtaatattcttatagaaatggccaaggcctcccccttcacctgtgcctcagatgctacccaatcccgccttctctgtccctccagaaggcaccctttgcttaggcctccctctcttcctgaaccacctctggaagtttcttattggcctatgaatgcattcttatttcttcttatcaaataaagccttccctttaatttatggcacatttatgctttggaatccactctcaggaataatcagtatgtagcatattacacgtcaggcggcaacattctttttttttttttttttttttgaggcagggtcccgctctgtcatccaggctagagtacggtggtgcaatcatagttcactgcagcctcaacttcctggggtcaagccatcttcccacctcagtctcccaagtagctggaaccacatgtgtgcactaccacacccagctagtttttttttgtagagacagggccttgccttgttgcccaggctggtctccaagtcctgggctcaagtgatgctcctgccttggccttccaaagtgctaggattacaggtgtgagctaccatgcctggtccaacattcttcatttggtaaatggctaaacttagtgcagagtatgagcctgattttgtttaaaaaaaaaatgtgtgtgggtgtgtatatgtatctttgagtgtatataaaaagactgaaagagggctgggcacggtggctcatgcctgtaatcccagcactttgggaggctgagggaggcggatcacttaagtcaggagtttgagaccagactgggtgaaaccccatctctactaaaaaatgcaaaaattagctgggcatggtggcgggcacctgtaatcccagcaaccagggaggctgaggcaggagaatcacttgaacccaggaggtggaggttgcagtgacccgagatgcagtgagactccacctcaaaaaaaaaaaaaaaaaaaaaaaaaaagactaaggatatatatcaaaacccttatggcagactgttatttgtaattgtattttatttgtcgtgcttatatgtgttgcccaagtttctatggtgaacggtatgcatcactttcagcatgagaaaataactcctaataaacgtgattcttaaaggactctccctgtgtacatcctttccaaggagccccgatgtaccctgcttccctcacagccaagctcctctaggacagtcctccctagggggttacggccttgctcctttgatggccctgccacagcccaggggctctttcctgggcactgtggaccagaccctcctagaatccctctccttcctcaaccccagactctcaggcaccccatctctatcctggacaccgagcttgtcaccaaggcccagctgcagctgctgtgctgagtgtgcacagccacctctgggaaggctgtgctccccctgaggacctgggtcctcagtctctgactctggggggattcggggccacctacccaccttctggctctactcaacaccagcagcccctcaacatcaagccctccagctcacagcacctcagctctgcagctccaaagccaccccagcctggaactggggactcagggagactccctcgctccaactccagctggtcccagcactgcctctgctgtcatctctggaatctggtctcttgtccccagcccactgctgccagggtcagccctggtactttctacctgggttgctgcaacagcttccctctgggggccgcctgttttcagccttgggcccatctgccctccacgttgctgctgggcaagctgaggccccaccacacccccagcaccttcctgtgcctccaggccttccctgccagtacaccccctccagcccctgaagccctgtcagcagctcagagcctttccccggagtcaccctgcttcccgaggggacccacgttgctgctgggcaagctgaggccccgccacaaccccagcgccttcctctgcctccagactccctcctagcacaccctctccagctcctgcagtcccaccagcagctcagagcctcttccctgagtcaccctgcttcccgaggggacctccacccagggaatgcccttccaggctcctctcactgattcaccttcactcctcagaggtcaggtgctggctgatagaggcaatgaggtgagcccctcacctcagggcgctcagcccctgggaaggtgatgaaaaagggcaccccaaggggtgtcccaaactaataggtggatgactcccgtgggaagatccagtctcccctccccatggccaattaaatttggggtgtttttctttacttttttgaggcaaggtcttgctttgttgctcaggctggagtgcagtggcacaatcacagctcactgcagccttgacctcctgggctcaagcaatcctcctccttcagcttcctgaggaggttttaattaaataaattaaaagctaattaaaaacatttttttttttttttggtagagatggggtctcactgttttccaggctgatcttgaactcctggactcaagcaatcctcttgcttcagcctctggagtagctgggactacaggtgcttgctactatgcccagctattttttttattttttatttttattttgtagtgatggggtgtgtttcctaggctgatcttgaactcctgggctcaagcaatcctcctgcctcggcctcccaaagtgctgagattataggtatgagccattgcactcagcctggattgtattaaggaaactagcttagtcactaaactgcacttctacttctgattggacaagattggcactttgtaaaccaggttttctgggatgctggtttccttgaagatgtttctagctggtattatcatataggataggctgagttatgctgcattaacaagcaaaacccaaaaggtttatttctcattcgtgctgtatgtccagcaaatgtggctgggcttcattttaagtcgtcctcactcccagacctagcctgtaggtgccccaccattgggggatcgctgattgccatggcatggttagagaaatatggttcttaaaggttctcatccagagtggcacatctctcttctgctcacaatgtgttgaccaaagcaagtcacatggatgggagcagggagatgcaatcctctcttgtgcccaaaagaggagcacaagaaatactgttgaatagcattgccagaggccacagaaaaatctccaaaaccaaaaatctctatgacccaataaattcaagaaatactgggttaaagagaaggaaaccagtatatgcactgtgagacttctcagtctttattatatacattgtaaccatcacagacagcctttaatatatacatcttaactatcacagacagccttcagtatattatatacattataaccatcacagacagccttcaatatattatatacattataaccatcacagacagcctttaatatatacattataactatcacagcctttaatatattatgtacattgtaactatcacagcctttaatatattatatacattgtaactaccaccgcctttaatatagtatacccattgtaactatcacagcctttaatatacacattgttaactaccacagacagcctttaatatattatatacattgtaactatcacagatagcctttaatatatacattgtaactatcgcagacagccctttgtttgagggtaaagcatgtgactttgttttcctcctgttccctctgccatcctccagggcctcacacacaataggctctcaaatattgcaaccatcttgcactctgcagggcaacctcatggcttatcctttacaagtggcatactcagaagaataacgaggaagaaagtgtaagaaaagagggctgtttgggcaaagaaaatctggttgattcgatgtttacagagtgccaggccccatgcttgatctcatgaggtcctcagaccttatgccttaggctatcatttccattttacagataaggaattgaggctcagggaactgagagtgagggaagggcaggggcctggctggtgctgggttctgtctctttccaggcaagaagggacatgtggacttgaatatttagctcagggatgttggaggcctagggtgctgctatttaaatgg

SEQ ID NO: 3 - RNA, 2222 nt, Homo sapiens
  source 1..2222: mol_type = mRNA
gtagagagcgcttgcgggcgccgggcggagctgctgcggatcaggacccgagccgattcccgatcccgacccagatcctaacccgcgcccccgccccgccgccgccgccatgtacgacgcagagcgcggctggagcttgtccttcgcgggctgcggcttcctgggcttctaccacgtcggggcgacccgctgcctgagcgagcacgccccgcacctcctccgcgacgcgcgcatgttgttcggcgcttcggccggggcgttgcactgcgtcggcgtcctctccgagcagactctgcaggtcctctcagatcttgtgcggaaggccaggagtcggaacattggcatcttccatccatccttcaacttaagcaagttcctccgacagggtctctgcaaatgcctcccggccaatgtccaccagctcatctccggcaaaatatgcatctctcttaccagagtgtctgatggggaaaacgttctggtgtctgactttcggtccaaagacgaagtcgtggatgccttggtatgttcctgcttcatgcctttctacagtggccttatccctccttccttcagaggcgtgcgatatgtggatggaggagtgagtgacaacgtacccttcattgatgccaaaacaaccatcaccgtgtcccccttctatggggagtacgacatctgccctaaagtcaagtccacgaactttcttcatgtggacatcaccaagctcagtctacgcctctgcacagggaacctctaccttctctcgagagcttttgtccccccggatctcaaggtgctgggagagatatgccttcgaggatatttggatgcattcaggttcttggaagagaagggcatctgcaacaggccccagccaggcctgaagtcatcctcagaagggatggatcctgaggtcgccatgcccagctgggcaaacatgagtctggattcttccccggagtcggctgccttggctgtgaggctggagggagatgagctgctagaccacctgcgtctcagcatcctgccctgggatgagagcatcctggacaccctctcgcccaggctcgctacagcactgagtgaagaaatgaaagacaaaggtggatacatgagcaagatttgcaacttgctacccattaggataatgtcttatgtaatgctgccctgtaccctgcctgtggaatctgccattgcgattgtccagagactggtgacatggcttccagatatgcccgacgatgtcctgtggttgcagtgggtgacctcacaggtgttcactcgagtgctgatgtgtctgctccccgcctccaggtcccaaatgccagtgagcagccaacaggcctccccatgcacacctgagcaggactggccctgctggactccctgctcccccgagggctgtccagcagagaccaaagcagaggccaccccgcggtccatcctcaggtccagcctgaacttcttcttgggcaataaagtacctgctggtgctgaggggctctccacctttcccagtttttcactagagaagagtctgtgagtcacttgaggaggcgagtctagcagattctttcagaggtgctaaagtttcccatctttgtgcagctacctccgcattgctgtgtagtgacccctgcctgtgacgtggaggatcccagcctctgagctgagttggttttatgaaaagctaggaagcaacctttcgcctgtgcagcggtccagcacttaactctaatacatcagcatgcgttaattcagctggttgggaaatgacaccaggaagcccagtgcagagggtcccttactgactgtttcgtggccctattaatggtcagactgttccagcatgaggttcttagaatgacaggtgtttggatgggtgggggccttgtgatggggggtaggctggcccatgtgtgatcttgtggggtggagggaagagaatagcatgatcccacttccccatgctgtgggaaggggtgcagttcgtccccaagaacgacactgcctgtcaggtggtctgcaaagatgataaccttgactactaaaaacgtctccatggcgggggtaacaagatgataatctacttaattttagaacacctttttcacctaactaaaataatgtttaaagagttttgtataaaaatgtaaggaagcgttgttacctgttgaattttgtattatgtgaatcagtgagatgttagtagaataagcctt

SEQ ID NO: 4 - RNA, 886 nt, Homo sapiens
  source 1..886: mol_type = mRNA
ctgcccgggctcccgtgcggagtgggtgccccctaggccggggagcgggggatccccaggggtcgcggggccctggaggagcgggcatcggacgcggacacggcggggtgcatcccgagggccccctccgaggcagatgcttcctgcgggggcgctgttcctgggcccgggaagggggcgttggaaccccgagcggtccgggccgaagcctgggactctcagcagactctgcaggtcctctcagatcttgtgcggaaggccaggagtcggaacattggcatcttccatccatccttcaacttaagcaagttcctccgacagggtctcggcaaatgcctcccggccaatgtccaccagctcatctccggcaaaatatgcatctctcttaccagagtgtctgatggggaaaacgttctggtgtctgactttcggtccaaagacgaagtcgtggatgccttggtatgttcctgcttcatccccttctacagtggccttatccctccttccttcagaggcgtgcgatatgtggatggaggagtgagtgacaacgtaccccttcattgatgccaaaacaaccatcaccgtgtcccccttnctatgggagtacgacatctgccctanagtcaagtccacgaactttcttcatgtggacatcaccaagctcagtctacgcctctgcacagggaaacctctaccttctctcgagagcttttgtccccccggatctcaaggcatctgcaacaggccccagcccaggccctgaagtcctcctcaaaaggggatgggatcctggaggtcgcccttgccccggctgggccaaacattgagttctggatttcttccccccgagtccgcctgcccttggcctgtgaacgcttgaaagggc

SEQ ID NO: 5 - RNA, 423 nt, Homo sapiens
  source 1..423: mol_type = mRNA
tttcaacccacgatcacggctcactgcacctccatctccctggttcaagcgattctcctgcctccgcctcccgagtagctgggattacaggcatgtgctaccaagccctgctatggggtccccttatctgaaggcggtttttctttccagctcgacctcttgtgacccttagtttaacaagggccgaagttaaagagtttctgcgcctggacccctaatgaagcaatcagatttctcatctccagtcaggtgtgggtccaagcccactagacaagtttgctcttcccagagcacatttctgccttcaagtcatcctggcttgtcagggctgggggagttctgctgtagaaatattagagtggaaggaaaaagatgtgttgggagctatttttctttaatactaaaagttggttgatgaatttg

SEQ ID NO: 6 - RNA, 568 nt, Homo sapiens
  source 1..568: mol_type = mRNA
actgaggcagggtagagagcgcttgcgggcgccgggcggagctgctgcggatcaggacccgagccgattcccgatcccgacccagatcctaacccgcgcccccgccccgccgccgccgccatgtacgacgcagagcagcggctggagccttgtccttcgcgggcctgcggcttcctgggcttctaccacgtcggggcgacccgctgcctgagcgagcacgccccgcacctcctccgcgacgcgcgcatgttgttcggcgcttcggccggggcgttgcactgcgtcggcgtcctctccggtatcccgctggactctgcaggtcctctcagatcttgtgcggaaggccaggagtcggaacattggcatcttccatccatccttcaacttaagcaagttcctccgacagggtctcggcaaatgcctcccggccaatgtccaccagctcatctccggcaaaatatgcatctctcttaccagagtgtctgatggggaaaacgttctggtgtctgactttcggtccaaagacgaagtcgtggatgccttggtactttcctgcttcatccccttc

SEQ ID NO: 7-10 - skipped (4 entries)

SEQ ID NO: 11 - DNA, 21 bp, synthetic construct
  source 1..21: mol_type = other DNA
ccttggtatgttcctgcttca

SEQ ID NO: 12 - DNA, 21 bp, synthetic construct
  source 1..21: mol_type = other DNA
gttgtcactcactcctccatc

SEQ ID NO: 13 - DNA, 25 bp, synthetic construct
  source 1..25: mol_type = other DNA
tggccttatccctccttccttcaga

SEQ ID NO: 14 - DNA, 18 bp, synthetic construct
  source 1..18: mol_type = other DNA
tgaggctggagggagatg

SEQ ID NO: 15 - DNA, 22 bp, synthetic construct
  source 1..22: mol_type = other DNA
gctcatgtatccacctttgtct

SEQ ID NO: 16 - DNA, 24 bp, synthetic construct
  source 1..24: mol_type = other DNA
ctagaccacctgcgtctcagcatc

SEQ ID NO: 17 - DNA, 16 bp, synthetic construct
  source 1..16: mol_type = other DNA
ggcattcccagcgcga

SEQ ID NO: 18 - DNA, 16 bp, synthetic construct
  source 1..16: mol_type = other DNA
tcctgatccgcagcag

SEQ ID NO: 19 - DNA, 16 bp, synthetic construct
  source 1..16: mol_type = other DNA
ggctcgggtcctgatc

SEQ ID NO: 20 - DNA, 16 bp, synthetic construct
  source 1..16: mol_type = other DNA
gttaggatctgggtcg

SEQ ID NO: 21 - DNA, 16 bp, synthetic construct
  source 1..16: mol_type = other DNA
gtacatggcggcggcg

SEQ ID NO: 22 - DNA, 16 bp, synthetic construct
  source 1..16: mol_type = other DNA
tccagccgcgctctgc

SEQ ID NO: 23 - DNA, 16 bp, synthetic construct
  source 1..16: mol_type = other DNA
gcgaaggacaagctcc

SEQ ID NO: 24 - DNA, 16 bp, synthetic construct
  source 1..16: mol_type = other DNA
cgcgaaggacaagctc

SEQ ID NO: 25 - DNA, 16 bp, synthetic construct
  source 1..16: mol_type = other DNA
gcggaggaggtgcggg

SEQ ID NO: 26 - DNA, 16 bp, synthetic construct
  source 1..16: mol_type = other DNA
cgcggaggaggtgcgg

SEQ ID NO: 27 - DNA, 16 bp, synthetic construct
  source 1..16: mol_type = other DNA
tcgcggaggaggtgcg

SEQ ID NO: 28 - DNA, 16 bp, synthetic construct
  source 1..16: mol_type = other DNA
gaacaacatgcgcgcg

SEQ ID NO: 29 - DNA, 16 bp, synthetic construct
  source 1..16: mol_type = other DNA
cgaacaacatgcgcgc

SEQ ID NO: 30 - DNA, 16 bp, synthetic construct
  source 1..16: mol_type = other DNA
ccgaacaacatgcgcg

SEQ ID NO: 31 - DNA, 16 bp, synthetic construct
  source 1..16: mol_type = other DNA
gccgaacaacatgcgc

SEQ ID NO: 32 - DNA, 16 bp, synthetic construct
  source 1..16: mol_type = other DNA
cgccgaacaacatgcg

SEQ ID NO: 33 - DNA, 16 bp, synthetic construct
  source 1..16: mol_type = other DNA
gccgacgcagtgcaac

SEQ ID NO: 34 - DNA, 16 bp, synthetic construct
  source 1..16: mol_type = other DNA
cgccgacgcagtgcaa

SEQ ID NO: 35 - DNA, 16 bp, synthetic construct
  source 1..16: mol_type = other DNA
gggataccggagagga

SEQ ID NO: 36 - DNA, 16 bp, synthetic construct
  source 1..16: mol_type = other DNA
tctgagaggacctgca

SEQ ID NO: 37 - DNA, 16 bp, synthetic construct
  source 1..16: mol_type = other DNA
caagatctgagaggac

SEQ ID NO: 38 - DNA, 16 bp, synthetic construct
  source 1..16: mol_type = other DNA
gccaatgttccgactc

SEQ ID NO: 39 - DNA, 16 bp, synthetic construct
  source 1..16: mol_type = other DNA
gaagatgccaatgttc

SEQ ID NO: 40 - DNA, 16 bp, synthetic construct
  source 1..16: mol_type = other DNA
ttaagttgaaggatgg

SEQ ID NO: 41 - DNA, 16 bp, synthetic construct
  source 1..16: mol_type = other DNA
tgcttaagttgaagga

SEQ ID NO: 42 - DNA, 16 bp, synthetic construct
  source 1..16: mol_type = other DNA
tggacattggccggga

SEQ ID NO: 43 - DNA, 16 bp, synthetic construct
  source 1..16: mol_type = other DNA
gtggacattggccggg

SEQ ID NO: 44 - DNA, 16 bp, synthetic construct
  source 1..16: mol_type = other DNA
agctggtggacattgg

SEQ ID NO: 45 - DNA, 16 bp, synthetic construct
  source 1..16: mol_type = other DNA
catcagacactctggt

SEQ ID NO: 46 - DNA, 16 bp, synthetic construct
  source 1..16: mol_type = other DNA
ccccatcagacactct

SEQ ID NO: 47 - DNA, 16 bp, synthetic construct
  source 1..16: mol_type = other DNA
agtcagacaccagaac

SEQ ID NO: 48 - DNA, 16 bp, synthetic construct
  source 1..16: mol_type = other DNA
tggcatcaatgaaggg

SEQ ID NO: 49 - DNA, 16 bp, synthetic construct
  source 1..16: mol_type = other DNA
tgttttggcatcaatg

SEQ ID NO: 50 - DNA, 16 bp, synthetic construct
  source 1..16: mol_type = other DNA
tttagggcagatgtcg

SEQ ID NO: 51 - DNA, 16 bp, synthetic construct
  source 1..16: mol_type = other DNA
ctttagggcagatgtc

SEQ ID NO: 52 - DNA, 16 bp, synthetic construct
  source 1..16: mol_type = other DNA
gtagactgagcttggt

SEQ ID NO: 53 - DNA, 16 bp, synthetic construct
  source 1..16: mol_type = other DNA
aggtagaggttccctg

SEQ ID NO: 54 - DNA, 16 bp, synthetic construct
  source 1..16: mol_type = other DNA
gggacaaaagctctcg

SEQ ID NO: 55 - DNA, 16 bp, synthetic construct
  source 1..16: mol_type = other DNA
ggcatatctctcccag

SEQ ID NO: 56 - DNA, 16 bp, synthetic construct
  source 1..16: mol_type = other DNA
aggcatatctctccca

SEQ ID NO: 57 - DNA, 16 bp, synthetic construct
  source 1..16: mol_type = other DNA
aaatatcctcgaaggc

SEQ ID NO: 58 - DNA, 16 bp, synthetic construct
  source 1..16: mol_type = other DNA
ccaaatatcctcgaag

SEQ ID NO: 59 - DNA, 16 bp, synthetic construct
  source 1..16: mol_type = other DNA
tccaaatatcctcgaa

SEQ ID NO: 60 - DNA, 16 bp, synthetic construct
  source 1..16: mol_type = other DNA
atgcatccaaatatcc

SEQ ID NO: 61 - DNA, 16 bp, synthetic construct
  source 1..16: mol_type = other DNA
ttgcagatgcccttct

SEQ ID NO: 62 - DNA, 16 bp, synthetic construct
  source 1..16: mol_type = other DNA
atccatcccttctgag

SEQ ID NO: 63 - DNA, 16 bp, synthetic construct
  source 1..16: mol_type = other DNA
gggcatggcgacctca

SEQ ID NO: 64 - DNA, 16 bp, synthetic construct
  source 1..16: mol_type = other DNA
actcatgtttgcccag

SEQ ID NO: 65 - DNA, 16 bp, synthetic construct
  source 1..16: mol_type = other DNA
ggtctagcagctcatc

SEQ ID NO: 66 - DNA, 16 bp, synthetic construct
  source 1..16: mol_type = other DNA
cgcaggtggtctagca

SEQ ID NO: 67 - DNA, 16 bp, synthetic construct
  source 1..16: mol_type = other DNA
acgcaggtggtctagc

SEQ ID NO: 68 - DNA, 16 bp, synthetic construct
  source 1..16: mol_type = other DNA
tgagacgcaggtggtc

SEQ ID NO: 69 - DNA, 16 bp, synthetic construct
  source 1..16: mol_type = other DNA
ggatgctgagacgcag

SEQ ID NO: 70 - DNA, 16 bp, synthetic construct
  source 1..16: mol_type = other DNA
gtatccacctttgtct

SEQ ID NO: 71 - DNA, 16 bp, synthetic construct
  source 1..16: mol_type = other DNA
gctcatgtatccacct

SEQ ID NO: 72 - DNA, 16 bp, synthetic construct
  source 1..16: mol_type = other DNA
gcaaatcttgctcatg

SEQ ID NO: 73 - DNA, 16 bp, synthetic construct
  source 1..16: mol_type = other DNA
tgcaaatcttgctcat

SEQ ID NO: 74 - DNA, 16 bp, synthetic construct
  source 1..16: mol_type = other DNA
ttgcaaatcttgctca

SEQ ID NO: 75 - DNA, 16 bp, synthetic construct
  source 1..16: mol_type = other DNA
agcaagttgcaaatct

SEQ ID NO: 76 - DNA, 16 bp, synthetic construct
  source 1..16: mol_type = other DNA
gggtagcaagttgcaa

SEQ ID NO: 77 - DNA, 16 bp, synthetic construct
  source 1..16: mol_type = other DNA
cctaatgggtagcaag

SEQ ID NO: 78 - DNA, 16 bp, synthetic construct
  source 1..16: mol_type = other DNA
tcctaatgggtagcaa

SEQ ID NO: 79 - DNA, 16 bp, synthetic construct
  source 1..16: mol_type = other DNA
atcctaatgggtagca

SEQ ID NO: 80 - DNA, 16 bp, synthetic construct
  source 1..16: mol_type = other DNA
cattatcctaatgggt

SEQ ID NO: 81 - DNA, 16 bp, synthetic construct
  source 1..16: mol_type = other DNA
acattatcctaatggg

SEQ ID NO: 82 - DNA, 16 bp, synthetic construct
  source 1..16: mol_type = other DNA
gacattatcctaatgg

SEQ ID NO: 83 - DNA, 16 bp, synthetic construct
  source 1..16: mol_type = other DNA
tacataagacattatc

SEQ ID NO: 84 - DNA, 16 bp, synthetic construct
  source 1..16: mol_type = other DNA
gcattacataagacat

SEQ ID NO: 85 - DNA, 16 bp, synthetic construct
  source 1..16: mol_type = other DNA
ccacaggcagggtaca

SEQ ID NO: 86 - DNA, 16 bp, synthetic construct
  source 1..16: mol_type = other DNA
tccacaggcagggtac

SEQ ID NO: 87 - DNA, 16 bp, synthetic construct
  source 1..16: mol_type = other DNA
ggcagattccacaggc

SEQ ID NO: 88 - DNA, 16 bp, synthetic construct
  source 1..16: mol_type = other DNA
cgcaatggcagattcc

SEQ ID NO: 89 - DNA, 16 bp, synthetic construct
  source 1..16: mol_type = other DNA
gacaatcgcaatggca

SEQ ID NO: 90 - DNA, 16 bp, synthetic construct
  source 1..16: mol_type = other DNA
ggacaatcgcaatggc

SEQ ID NO: 91 - DNA, 16 bp, synthetic construct
  source 1..16: mol_type = other DNA
tggacaatcgcaatgg

SEQ ID NO: 92 - DNA, 16 bp, synthetic construct
  source 1..16: mol_type = other DNA
agccatgtcaccagtc

SEQ ID NO: 93 - DNA, 16 bp, synthetic construct
  source 1..16: mol_type = other DNA
tggaagccatgtcacc

SEQ ID NO: 94 - DNA, 16 bp, synthetic construct
  source 1..16: mol_type = other DNA
ctggaagccatgtcac

SEQ ID NO: 95 - DNA, 16 bp, synthetic construct
  source 1..16: mol_type = other DNA
ggcatatctggaagcc

SEQ ID NO: 96 - DNA, 16 bp, synthetic construct
  source 1..16: mol_type = other DNA
gggcatatctggaagc

SEQ ID NO: 97 - DNA, 16 bp, synthetic construct
  source 1..16: mol_type = other DNA
agcactcgagtgaaca

SEQ ID NO: 98 - DNA, 16 bp, synthetic construct
  source 1..16: mol_type = other DNA
gcatttgggacctgga

SEQ ID NO: 99 - DNA, 16 bp, synthetic construct
  source 1..16: mol_type = other DNA
ggcatttgggacctgg

SEQ ID NO: 100 - DNA, 16 bp, synthetic construct
  source 1..16: mol_type = other DNA
tggcatttgggacctg

SEQ ID NO: 101 - DNA, 16 bp, synthetic construct
  source 1..16: mol_type = other DNA
gctcactggcatttgg

SEQ ID NO: 102 - DNA, 16 bp, synthetic construct
  source 1..16: mol_type = other DNA
gttcaggctggacctg

SEQ ID NO: 103 - DNA, 16 bp, synthetic construct
  source 1..16: mol_type = other DNA
aggtactttattgccc

SEQ ID NO: 104 - DNA, 16 bp, synthetic construct
  source 1..16: mol_type = other DNA
agcaggtactttattg

SEQ ID NO: 105 - DNA, 16 bp, synthetic construct
  source 1..16: mol_type = other DNA
aactttagcacctctg

SEQ ID NO: 106 - DNA, 16 bp, synthetic construct
  source 1..16: mol_type = other DNA
gaaactttagcacctc

SEQ ID NO: 107 - DNA, 16 bp, synthetic construct
  source 1..16: mol_type = other DNA
ggaaactttagcacct

SEQ ID NO: 108 - DNA, 16 bp, synthetic construct
  source 1..16: mol_type = other DNA
ctgcacaaagatggga

SEQ ID NO: 109 - DNA, 16 bp, synthetic construct
  source 1..16: mol_type = other DNA
agctgcacaaagatgg

SEQ ID NO: 110 - DNA, 16 bp, synthetic construct
  source 1..16: mol_type = other DNA
agcaatgcggaggtag

SEQ ID NO: 111 - DNA, 16 bp, synthetic construct
  source 1..16: mol_type = other DNA
accaactcagctcaga

SEQ ID NO: 112 - DNA, 16 bp, synthetic construct
  source 1..16: mol_type = other DNA
aaccaactcagctcag

SEQ ID NO: 113 - DNA, 16 bp, synthetic construct
  source 1..16: mol_type = other DNA
tcctagcttttcataa

SEQ ID NO: 114 - DNA, 16 bp, synthetic construct
  source 1..16: mol_type = other DNA
tgctggaccgctgcac

SEQ ID NO: 115 - DNA, 16 bp, synthetic construct
  source 1..16: mol_type = other DNA
gagttaagtgctggac

SEQ ID NO: 116 - DNA, 16 bp, synthetic construct
  source 1..16: mol_type = other DNA
gtattagagttaagtg

SEQ ID NO: 117 - DNA, 16 bp, synthetic construct
  source 1..16: mol_type = other DNA
tgtattagagttaagt

SEQ ID NO: 118 - DNA, 16 bp, synthetic construct
  source 1..16: mol_type = other DNA
tgatgtattagagtta

SEQ ID NO: 119 - DNA, 16 bp, synthetic construct
  source 1..16: mol_type = other DNA
gctgatgtattagagt

SEQ ID NO: 120 - DNA, 16 bp, synthetic construct
  source 1..16: mol_type = other DNA
tgaattaacgcatgct

SEQ ID NO: 121 - DNA, 16 bp, synthetic construct
  source 1..16: mol_type = other DNA
ctgaattaacgcatgc

SEQ ID NO: 122 - DNA, 16 bp, synthetic construct
  source 1..16: mol_type = other DNA
agtaagggaccctctg

SEQ ID NO: 123 - DNA, 16 bp, synthetic construct
  source 1..16: mol_type = other DNA
cagtaagggaccctct

SEQ ID NO: 124 - DNA, 16 bp, synthetic construct
  source 1..16: mol_type = other DNA
tcagtaagggaccctc

SEQ ID NO: 125 - DNA, 16 bp, synthetic construct
  source 1..16: mol_type = other DNA
agtcagtaagggaccc

SEQ ID NO: 126 - DNA, 16 bp, synthetic construct
  source 1..16: mol_type = other DNA
attaatagggccacga

SEQ ID NO: 127 - DNA, 16 bp, synthetic construct
  source 1..16: mol_type = other DNA
ccattaatagggccac

SEQ ID NO: 128 - DNA, 16 bp, synthetic construct
  source 1..16: mol_type = other DNA
accattaatagggcca

SEQ ID NO: 129 - DNA, 16 bp, synthetic construct
  source 1..16: mol_type = other DNA
gaacagtctgaccatt

SEQ ID NO: 130 - DNA, 16 bp, synthetic construct
  source 1..16: mol_type = other DNA
tggaacagtctgacca

SEQ ID NO: 131 - DNA, 16 bp, synthetic construct
  source 1..16: mol_type = other DNA
ctggaacagtctgacc

SEQ ID NO: 132 - DNA, 16 bp, synthetic construct
  source 1..16: mol_type = other DNA
tgctggaacagtctga

SEQ ID NO: 133 - DNA, 16 bp, synthetic construct
  source 1..16: mol_type = other DNA
cctcatgctggaacag

SEQ ID NO: 134 - DNA, 16 bp, synthetic construct
  source 1..16: mol_type = other DNA
tcattctaagaacctc

SEQ ID NO: 135 - DNA, 16 bp, synthetic construct
  source 1..16: mol_type = other DNA
acccatccaaacacct

SEQ ID NO: 136 - DNA, 16 bp, synthetic construct
  source 1..16: mol_type = other DNA
acacatgggccagcct

SEQ ID NO: 137 - DNA, 16 bp, synthetic construct
  source 1..16: mol_type = other DNA
caagatcacacatggg

SEQ ID NO: 138 - DNA, 16 bp, synthetic construct
  source 1..16: mol_type = other DNA
gggacgaactgcaccc

SEQ ID NO: 139 - DNA, 16 bp, synthetic construct
  source 1..16: mol_type = other DNA
tatcatctttgcagac

SEQ ID NO: 140 - DNA, 16 bp, synthetic construct
  source 1..16: mol_type = other DNA
gtttttagtagtcaag

SEQ ID NO: 141 - DNA, 16 bp, synthetic construct
  source 1..16: mol_type = other DNA
cgtttttagtagtcaa

SEQ ID NO: 142 - DNA, 16 bp, synthetic construct
  source 1..16: mol_type = other DNA
tatcatcttgttaccc

SEQ ID NO: 143 - DNA, 16 bp, synthetic construct
  source 1..16: mol_type = other DNA
gattatcatcttgtta

SEQ ID NO: 144 - DNA, 16 bp, synthetic construct
  source 1..16: mol_type = other DNA
tagattatcatcttgt

SEQ ID NO: 145 - DNA, 16 bp, synthetic construct
  source 1..16: mol_type = other DNA
gtagattatcatcttg

SEQ ID NO: 146 - DNA, 16 bp, synthetic construct
  source 1..16: mol_type = other DNA
agtagattatcatctt

SEQ ID NO: 147 - DNA, 16 bp, synthetic construct
  source 1..16: mol_type = other DNA
gtgaaaaaggtgttct

SEQ ID NO: 148 - DNA, 16 bp, synthetic construct
  source 1..16: mol_type = other DNA
tagttaggtgaaaaag

SEQ ID NO: 149 - DNA, 16 bp, synthetic construct
  source 1..16: mol_type = other DNA
ttattttagttaggtg

SEQ ID NO: 150 - DNA, 16 bp, synthetic construct
  source 1..16: mol_type = other DNA
cattattttagttagg

SEQ ID NO: 151 - DNA, 16 bp, synthetic construct
  source 1..16: mol_type = other DNA
ctactaacatctcact

SEQ ID NO: 152 - DNA, 16 bp, synthetic construct
  source 1..16: mol_type = other DNA
tctactaacatctcac

SEQ ID NO: 153 - DNA, 16 bp, synthetic construct
  source 1..16: mol_type = other DNA
ttattctactaacatc

SEQ ID NO: 154 - DNA, 16 bp, synthetic construct
  source 1..16: mol_type = other DNA
gcttattctactaaca

SEQ ID NO: 155 - DNA, 16 bp, synthetic construct
  source 1..16: mol_type = other DNA
ggcttattctactaac

SEQ ID NO: 156 - DNA, 16 bp, synthetic construct
  source 1..16: mol_type = other DNA
ggtgaatgccctgcac

SEQ ID NO: 157 - DNA, 16 bp, synthetic construct
  source 1..16: mol_type = other DNA
ttcaagttgtgtgctc

SEQ ID NO: 158 - DNA, 16 bp, synthetic construct
  source 1..16: mol_type = other DNA
gggagaaactcactga

SEQ ID NO: 159 - DNA, 16 bp, synthetic construct
  source 1..16: mol_type = other DNA
tgctacttgccccagc

SEQ ID NO: 160 - DNA, 16 bp, synthetic construct
  source 1..16: mol_type = other DNA
cacaatgctacttgcc

SEQ ID NO: 161 - DNA, 16 bp, synthetic construct
  source 1..16: mol_type = other DNA
cccaatggcagggctt

SEQ ID NO: 162 - DNA, 16 bp, synthetic construct
  source 1..16: mol_type = other DNA
tgctcctacccaatgg

SEQ ID NO: 163 - DNA, 16 bp, synthetic construct
  source 1..16: mol_type = other DNA
gacttttattgttgct

SEQ ID NO: 164 - DNA, 16 bp, synthetic construct
  source 1..16: mol_type = other DNA
ttctataccagagtga

SEQ ID NO: 165 - DNA, 16 bp, synthetic construct
  source 1..16: mol_type = other DNA
tttctataccagagtg

SEQ ID NO: 166 - DNA, 16 bp, synthetic construct
  source 1..16: mol_type = other DNA
gtagatggccttaatg

SEQ ID NO: 167 - DNA, 16 bp, synthetic construct
  source 1..16: mol_type = other DNA
tacatccacgacttcg

SEQ ID NO: 168 - DNA, 16 bp, synthetic construct
  source 1..16: mol_type = other DNA
ttacatccacgacttc

SEQ ID NO: 169 - DNA, 16 bp, synthetic construct
  source 1..16: mol_type = other DNA
ggaacattcagggttt

SEQ ID NO: 170 - DNA, 16 bp, synthetic construct
  source 1..16: mol_type = other DNA
attacttgggtgcagg

SEQ ID NO: 171 - DNA, 16 bp, synthetic construct
  source 1..16: mol_type = other DNA
gcagattacttgggtg

SEQ ID NO: 172 - DNA, 16 bp, synthetic construct
  source 1..16: mol_type = other DNA
tgcaggacaggttcct

SEQ ID NO: 173 - DNA, 16 bp, synthetic construct
  source 1..16: mol_type = other DNA
cacactgggtcaccac

SEQ ID NO: 174 - DNA, 16 bp, synthetic construct
  source 1..16: mol_type = other DNA
agtcacactgggtcac

SEQ ID NO: 175 - DNA, 16 bp, synthetic construct
  source 1..16: mol_type = other DNA
ggtatatgttcccagg

SEQ ID NO: 176 - DNA, 16 bp, synthetic construct
  source 1..16: mol_type = other DNA
tataaccacagcctgg

SEQ ID NO: 177 - DNA, 16 bp, synthetic construct
  source 1..16: mol_type = other DNA
ctgactatataaccac

SEQ ID NO: 178 - DNA, 16 bp, synthetic construct
  source 1..16: mol_type = other DNA
atcttagtggctgggt

SEQ ID NO: 179 - DNA, 16 bp, synthetic construct
  source 1..16: mol_type = other DNA
cttactatggtagagt

SEQ ID NO: 180 - DNA, 16 bp, synthetic construct
  source 1..16: mol_type = other DNA
tcttactatggtagag

SEQ ID NO: 181 - DNA, 16 bp, synthetic construct
  source 1..16: mol_type = other DNA
tgcattgcatagcctt

SEQ ID NO: 182 - DNA, 16 bp, synthetic construct
  source 1..16: mol_type = other DNA
ttgcattgcatagcct

SEQ ID NO: 183 - DNA, 16 bp, synthetic construct
  source 1..16: mol_type = other DNA
tgcttataaagcacac

SEQ ID NO: 184 - DNA, 16 bp, synthetic construct
  source 1..16: mol_type = other DNA
ggaataagcctccacc

SEQ ID NO: 185 - DNA, 16 bp, synthetic construct
  source 1..16: mol_type = other DNA
gaaatctgattgcttc

SEQ ID NO: 186 - DNA, 16 bp, synthetic construct
  source 1..16: mol_type = other DNA
tacttatctgctcact

SEQ ID NO: 187 - DNA, 16 bp, synthetic construct
  source 1..16: mol_type = other DNA
tctcttagtgtcccca

SEQ ID NO: 188 - DNA, 16 bp, synthetic construct
  source 1..16: mol_type = other DNA
atctcttagtgtcccc

SEQ ID NO: 189 - DNA, 16 bp, synthetic construct
  source 1..16: mol_type = other DNA
tcacattcatgcttgc

SEQ ID NO: 190 - DNA, 16 bp, synthetic construct
  source 1..16: mol_type = other DNA
gataacctcacattca

SEQ ID NO: 191 - DNA, 16 bp, synthetic construct
  source 1..16: mol_type = other DNA
gagctaggtgcttcac

SEQ ID NO: 192 - DNA, 16 bp, synthetic construct
  source 1..16: mol_type = other DNA
ataacaactgaaccac

SEQ ID NO: 193 - DNA, 16 bp, synthetic construct
  source 1..16: mol_type = other DNA
gttattagccaaatgc

SEQ ID NO: 194 - DNA, 16 bp, synthetic construct
  source 1..16: mol_type = other DNA
ggagacttggcaaggt

SEQ ID NO: 195 - DNA, 16 bp, synthetic construct
  source 1..16: mol_type = other DNA
attcatgacagccctt

SEQ ID NO: 196 - DNA, 16 bp, synthetic construct
  source 1..16: mol_type = other DNA
atcgatttttcagagt

SEQ ID NO: 197 - DNA, 16 bp, synthetic construct
  source 1..16: mol_type = other DNA
acaaacatcgattttt

SEQ ID NO: 198 - DNA, 16 bp, synthetic construct
  source 1..16: mol_type = other DNA
ctctttaatgacctcg

SEQ ID NO: 199 - DNA, 16 bp, synthetic construct
  source 1..16: mol_type = other DNA
gtcagaggcactcaca

SEQ ID NO: 200 - DNA, 16 bp, synthetic construct
  source 1..16: mol_type = other DNA
agctattatctcccac

SEQ ID NO: 201 - DNA, 16 bp, synthetic construct
  source 1..16: mol_type = other DNA
agtttctgggcttgca

SEQ ID NO: 202 - DNA, 16 bp, synthetic construct
  source 1..16: mol_type = other DNA
ggcaatcacaagagac

SEQ ID NO: 203 - DNA, 16 bp, synthetic construct
  source 1..16: mol_type = other DNA
agaggaagcccaatca

SEQ ID NO: 204 - DNA, 16 bp, synthetic construct
  source 1..16: mol_type = other DNA
cagaggaagcccaatc

SEQ ID NO: 205 - DNA, 16 bp, synthetic construct
  source 1..16: mol_type = other DNA
tagaaattgcagtgcc

SEQ ID NO: 206 - DNA, 16 bp, synthetic construct
  source 1..16: mol_type = other DNA
tcctatccatatattg

SEQ ID NO: 207 - DNA, 16 bp, synthetic construct
  source 1..16: mol_type = other DNA
gcaattctagacatgg

SEQ ID NO: 208 - DNA, 16 bp, synthetic construct
  source 1..16: mol_type = other DNA
aggacttacaccaaga

SEQ ID NO: 209 - DNA, 16 bp, synthetic construct
  source 1..16: mol_type = other DNA
ttcctaataagagccc

SEQ ID NO: 210 - DNA, 16 bp, synthetic construct
  source 1..16: mol_type = other DNA
gtcaaacatcttccta

SEQ ID NO: 211 - DNA, 16 bp, synthetic construct
  source 1..16: mol_type = other DNA
aaaactgtaggatagg

SEQ ID NO: 212 - DNA, 16 bp, synthetic construct
  source 1..16: mol_type = other DNA
gttacatccataaaac

SEQ ID NO: 213 - DNA, 16 bp, synthetic construct
  source 1..16: mol_type = other DNA
agagaatgttacatcc

SEQ ID NO: 214 - DNA, 16 bp, synthetic construct
  source 1..16: mol_type = other DNA
aaagattaatcagggc

SEQ ID NO: 215 - DNA, 16 bp, synthetic construct
  source 1..16: mol_type = other DNA
gtatttacctggaggc

SEQ ID NO: 216 - DNA, 16 bp, synthetic construct
  source 1..16: mol_type = other DNA
ggcctatgattttcag

SEQ ID NO: 217 - DNA, 16 bp, synthetic construct
  source 1..16: mol_type = other DNA
atacttttggcaaggc

SEQ ID NO: 218 - DNA, 16 bp, synthetic construct
  source 1..16: mol_type = other DNA
aatacttttggcaagg

SEQ ID NO: 219 - DNA, 16 bp, synthetic construct
  source 1..16: mol_type = other DNA
tgcttacatccacgac

SEQ ID NO: 220 - DNA, 16 bp, synthetic construct
  source 1..16: mol_type = other DNA
catcatgttggtctcg

SEQ ID NO: 221 - DNA, 16 bp, synthetic construct
  source 1..16: mol_type = other DNA
gattacttgggtgcag

SEQ ID NO: 222 - DNA, 16 bp, synthetic construct
  source 1..16: mol_type = other DNA
cagattacttgggtgc

SEQ ID NO: 223 - DNA, 16 bp, synthetic construct
  source 1..16: mol_type = other DNA
tttaatggtgttttgg

SEQ ID NO: 224 - DNA, 16 bp, synthetic construct
  source 1..16: mol_type = other DNA
tcaaatgccggtattc

SEQ ID NO: 225 - DNA, 16 bp, synthetic construct
  source 1..16: mol_type = other DNA
gtgaacttcaacttcc

SEQ ID NO: 226 - DNA, 16 bp, synthetic construct
  source 1..16: mol_type = other DNA
ctatataaccacagcc

SEQ ID NO: 227 - DNA, 16 bp, synthetic construct
  source 1..16: mol_type = other DNA
gactatataaccacag

SEQ ID NO: 228 - DNA, 16 bp, synthetic construct
  source 1..16: mol_type = other DNA
aatcatcttagtggct

SEQ ID NO: 229 - DNA, 16 bp, synthetic construct
  source 1..16: mol_type = other DNA
tactatggtagagtgg

SEQ ID NO: 230 - DNA, 16 bp, synthetic construct
  source 1..16: mol_type = other DNA
gtacatggtctgcaaa

SEQ ID NO: 231 - DNA, 16 bp, synthetic construct
  source 1..16: mol_type = other DNA
tgtacatggtctgcaa

SEQ ID NO: 232 - DNA, 16 bp, synthetic construct
  source 1..16: mol_type = other DNA
gcatgcattgcattgc

SEQ ID NO: 233 - DNA, 16 bp, synthetic construct
  source 1..16: mol_type = other DNA
accaatcctgttagac

SEQ ID NO: 234 - DNA, 16 bp, synthetic construct
  source 1..16: mol_type = other DNA
ggagacaccaagcacc

SEQ ID NO: 235 - DNA, 16 bp, synthetic construct
  source 1..16: mol_type = other DNA
gcactaagtgttagaa

SEQ ID NO: 236 - DNA, 16 bp, synthetic construct
  source 1..16: mol_type = other DNA
gcttacttatctgctc

SEQ ID NO: 237 - DNA, 16 bp, synthetic construct
  source 1..16: mol_type = other DNA
ggagatccatcctgca

SEQ ID NO: 238 - DNA, 16 bp, synthetic construct
  source 1..16: mol_type = other DNA
catctcttagtgtccc

SEQ ID NO: 239 - DNA, 16 bp, synthetic construct
  source 1..16: mol_type = other DNA
tcctaatgtcctcaac

SEQ ID NO: 240 - DNA, 16 bp, synthetic construct
  source 1..16: mol_type = other DNA
aagataacctcacatt

SEQ ID NO: 241 - DNA, 16 bp, synthetic construct
  source 1..16: mol_type = other DNA
caagataacctcacat

SEQ ID NO: 242 - DNA, 16 bp, synthetic construct
  source 1..16: mol_type = other DNA
tataacaactgaacca

SEQ ID NO: 243 - DNA, 16 bp, synthetic construct
  source 1..16: mol_type = other DNA
gctttaaagcaggaca

SEQ ID NO: 244 - DNA, 16 bp, synthetic construct
  source 1..16: mol_type = other DNA
aaaattgtgggtttag

SEQ ID NO: 245 - DNA, 16 bp, synthetic construct
  source 1..16: mol_type = other DNA
atcatttggaccatag

SEQ ID NO: 246 - DNA, 16 bp, synthetic construct
  source 1..16: mol_type = other DNA
acatcgatttttcaga

SEQ ID NO: 247 - DNA, 16 bp, synthetic construct
  source 1..16: mol_type = other DNA
caaacatcgatttttc

SEQ ID NO: 248 - DNA, 16 bp, synthetic construct
  source 1..16: mol_type = other DNA
gctttacaagctggtc

SEQ ID NO: 249 - DNA, 16 bp, synthetic construct
  source 1..16: mol_type = other DNA
atctatgttctcctag

SEQ ID NO: 250 - DNA, 16 bp, synthetic construct
  source 1..16: mol_type = other DNA
acctaaaatgctcacc

SEQ ID NO: 251 - DNA, 16 bp, synthetic construct
  source 1..16: mol_type = other DNA
ccagactacatgccac

SEQ ID NO: 252 - DNA, 16 bp, synthetic construct
  source 1..16: mol_type = other DNA
tctactaggcatctct

SEQ ID NO: 253 - DNA, 16 bp, synthetic construct
  source 1..16: mol_type = other DNA
ttctactaggcatctc

SEQ ID NO: 254 - DNA, 16 bp, synthetic construct
  source 1..16: mol_type = other DNA
tcagaggaagcccaat

SEQ ID NO: 255 - DNA, 16 bp, synthetic construct
  source 1..16: mol_type = other DNA
gaaattgcagtgccct

SEQ ID NO: 256 - DNA, 16 bp, synthetic construct
  source 1..16: mol_type = other DNA
gccaacctatcactga

SEQ ID NO: 257 - DNA, 16 bp, synthetic construct
  source 1..16: mol_type = other DNA
agacatggccaaccta

SEQ ID NO: 258 - DNA, 16 bp, synthetic construct
  source 1..16: mol_type = other DNA
tgaaataaggacttac

SEQ ID NO: 259 - DNA, 16 bp, synthetic construct
  source 1..16: mol_type = other DNA
cctaataagagcccca

SEQ ID NO: 260 - DNA, 16 bp, synthetic construct
  source 1..16: mol_type = other DNA
gaaatctgtcagagca

SEQ ID NO: 261 - DNA, 16 bp, synthetic construct
  source 1..16: mol_type = other DNA
tgtaggataggactag

SEQ ID NO: 262 - DNA, 16 bp, synthetic construct
  source 1..16: mol_type = other DNA
gaatgttacatccata

SEQ ID NO: 263 - DNA, 16 bp, synthetic construct
  source 1..16: mol_type = other DNA
gagaatgttacatcca

SEQ ID NO: 264 - DNA, 16 bp, synthetic construct
  source 1..16: mol_type = other DNA
gtgataaatctgcaag

SEQ ID NO: 265 - DNA, 16 bp, synthetic construct
  source 1..16: mol_type = other DNA
agattaatcagggcca

SEQ ID NO: 266 - DNA, 16 bp, synthetic construct
  source 1..16: mol_type = other DNA
aagattaatcagggcc

SEQ ID NO: 267 - DNA, 16 bp, synthetic construct
  source 1..16: mol_type = other DNA
ggtcacatgtgagccc

SEQ ID NO: 268 - DNA, 16 bp, synthetic construct
  source 1..16: mol_type = other DNA
cacttctggttcaaga

SEQ ID NO: 269 - DNA, 16 bp, synthetic construct
  source 1..16: mol_type = other DNA
ccaatctgatgacttc

SEQ ID NO: 270 - DNA, 16 bp, synthetic construct
  source 1..16: mol_type = other DNA
aagtatttacctggag

SEQ ID NO: 271 - DNA, 16 bp, synthetic construct
  source 1..16: mol_type = other DNA
cactcaaagagactca

SEQ ID NO: 272 - DNA, 16 bp, synthetic construct
  source 1..16: mol_type = other DNA
gcctatgattttcagg

SEQ ID NO: 273 - DNA, 16 bp, synthetic construct
  source 1..16: mol_type = other DNA
cactactgccctcttc

SEQ ID NO: 274 - DNA, 16 bp, synthetic construct
  source 1..16: mol_type = other DNA
tgctgggctgatgtca

SEQ ID NO: 275 - DNA, 16 bp, synthetic construct
  source 1..16: mol_type = other DNA
ggcatttgggacctga

SEQ ID NO: 276 - DNA, 16 bp, synthetic construct
  source 1..16: mol_type = other DNA
gcccccctcggaccat

SEQ ID NO: 277 - DNA, 16 bp, synthetic construct
  source 1..16: mol_type = other DNA
cctcagtgtctcggcc

SEQ ID NO: 278 - DNA, 16 bp, synthetic construct
  source 1..16: mol_type = other DNA
aatcggctcgggtcct

SEQ ID NO: 279 - DNA, 16 bp, synthetic construct
  source 1..16: mol_type = other DNA
gacaagctccagccgc

SEQ ID NO: 280 - DNA, 16 bp, synthetic construct
  source 1..16: mol_type = other DNA
cgctcaggcagcgggt

SEQ ID NO: 281 - DNA, 16 bp, synthetic construct
  source 1..16: mol_type = other DNA
ctccagcgggataccg

SEQ ID NO: 282 - DNA, 16 bp, synthetic construct
  source 1..16: mol_type = other DNA
ggccttccgcacaaga

SEQ ID NO: 283 - DNA, 16 bp, synthetic construct
  source 1..16: mol_type = other DNA
tggatggaagatgcca

SEQ ID NO: 284 - DNA, 16 bp, synthetic construct
  source 1..16: mol_type = other DNA
gagaccctgtcggagg

SEQ ID NO: 285 - DNA, 16 bp, synthetic construct
  source 1..16: mol_type = other DNA
gatgagctggtggaca

SEQ ID NO: 286 - DNA, 16 bp, synthetic construct
  source 1..16: mol_type = other DNA
gagagatgcctatttt

SEQ ID NO: 287 - DNA, 16 bp, synthetic construct
  source 1..16: mol_type = other DNA
gaccgaaagtcagaca

SEQ ID NO: 288 - DNA, 16 bp, synthetic construct
  source 1..16: mol_type = other DNA
gttttggcatcaatga

SEQ ID NO: 289 - DNA, 16 bp, synthetic construct
  source 1..16: mol_type = other DNA
gacttgactttagggc

SEQ ID NO: 290 - DNA, 16 bp, synthetic construct
  source 1..16: mol_type = other DNA
cgagagaaggtagagg

SEQ ID NO: 291 - DNA, 16 bp, synthetic construct
  source 1..16: mol_type = other DNA
ctcgaaggcatatctc

SEQ ID NO: 292 - DNA, 16 bp, synthetic construct
  source 1..16: mol_type = other DNA
gggcctgttgcagatg

SEQ ID NO: 293 - DNA, 16 bp, synthetic construct
  source 1..16: mol_type = other DNA
ggcatggcgacctcag

SEQ ID NO: 294 - DNA, 16 bp, synthetic construct
  source 1..16: mol_type = other DNA
agccaaggcagccgac

SEQ ID NO: 295 - DNA, 16 bp, synthetic construct
  source 1..16: mol_type = other DNA
gcgagcctgggcgaga

SEQ ID NO: 296 - DNA, 16 bp, synthetic construct
  source 1..16: mol_type = other DNA
ctcatgtatccacctt

SEQ ID NO: 297 - DNA, 16 bp, synthetic construct
  source 1..16: mol_type = other DNA
gggcagcattacataa

SEQ ID NO: 298 - DNA, 16 bp, synthetic construct
  source 1..16: mol_type = other DNA
aagccatgtcaccagt

SEQ ID NO: 299 - DNA, 16 bp, synthetic construct
  source 1..16: mol_type = other DNA
actcgagtgaacacct

SEQ ID NO: 300 - DNA, 16 bp, synthetic construct
  source 1..16: mol_type = other DNA
gcctgttggctgctca

SEQ ID NO: 301 - DNA, 16 bp, synthetic construct
  source 1..16: mol_type = other DNA
ctgctggacagccctt

SEQ ID NO: 302 - DNA, 16 bp, synthetic construct
  source 1..16: mol_type = other DNA
ctttattgcccaagaa

SEQ ID NO: 303 - DNA, 16 bp, synthetic construct
  source 1..16: mol_type = other DNA
cagactcttctctagt

SEQ ID NO: 304 - DNA, 16 bp, synthetic construct
  source 1..16: mol_type = other DNA
aatctgctagactcgc

SEQ ID NO: 305 - DNA, 16 bp, synthetic construct
  source 1..16: mol_type = other DNA
cagcaatgcggaggta

SEQ ID NO: 306 - DNA, 16 bp, synthetic construct
  source 1..16: mol_type = other DNA
gaaaggttgcttccta

SEQ ID NO: 307 - DNA, 16 bp, synthetic construct
  source 1..16: mol_type = other DNA
gtgctggaccgctgca

SEQ ID NO: 308 - DNA, 16 bp, synthetic construct
  source 1..16: mol_type = other DNA
aacgcatgctgatgta

SEQ ID NO: 309 - DNA, 16 bp, synthetic construct
  source 1..16: mol_type = other DNA
gcttcctggtgtcatt

SEQ ID NO: 310 - DNA, 16 bp, synthetic construct
  source 1..16: mol_type = other DNA
gccacgaaacagtcag

SEQ ID NO: 311 - DNA, 16 bp, synthetic construct
  source 1..16: mol_type = other DNA
catgctggaacagtct

SEQ ID NO: 312 - DNA, 16 bp, synthetic construct
  source 1..16: mol_type = other DNA
aaggcccccacccatc

SEQ ID NO: 313 - DNA, 16 bp, synthetic construct
  source 1..16: mol_type = other DNA
tgggccagcctacccc

SEQ ID NO: 314 - DNA, 16 bp, synthetic construct
  source 1..16: mol_type = other DNA
ggaagtgggatcatgc

SEQ ID NO: 315 - DNA, 16 bp, synthetic construct
  source 1..16: mol_type = other DNA
gttatcatctttgcag

SEQ ID NO: 316 - DNA, 16 bp, synthetic construct
  source 1..16: mol_type = other DNA
cttgttacccccgcca

SEQ ID NO: 317 - DNA, 16 bp, synthetic construct
  source 1..16: mol_type = other DNA
tctcactgattcacat

SEQ ID NO: 318 - DNA, 16 bp, synthetic construct
  source 1..16: mol_type = other DNA
ccctgcacactagatt

SEQ ID NO: 319 - DNA, 16 bp, synthetic construct
  source 1..16: mol_type = other DNA
gaggcggaagctcctg

SEQ ID NO: 320 - DNA, 16 bp, synthetic construct
  source 1..16: mol_type = other DNA
caggttcaagttgtgt

SEQ ID NO: 321 - DNA, 16 bp, synthetic construct
  source 1..16: mol_type = other DNA
aaatgtacggaatctc

SEQ ID NO: 322 - DNA, 16 bp, synthetic construct
  source 1..16: mol_type = other DNA
gtgtaaacatttgtcc

SEQ ID NO: 323 - DNA, 16 bp, synthetic construct
  source 1..16: mol_type = other DNA
agctttggtgtagatg

SEQ ID NO: 324 - DNA, 16 bp, synthetic construct
  source 1..16: mol_type = other DNA
tactatgggagccaca

SEQ ID NO: 325 - DNA, 16 bp, synthetic construct
  source 1..16: mol_type = other DNA
tgaaattgtaactgcc

SEQ ID NO: 326 - DNA, 16 bp, synthetic construct
  source 1..16: mol_type = other DNA
tagatcggtgctgttc

SEQ ID NO: 327 - DNA, 16 bp, synthetic construct
  source 1..16: mol_type = other DNA
gttataggcgagagca

SEQ ID NO: 328 - DNA, 16 bp, synthetic construct
  source 1..16: mol_type = other DNA
tatataaccacagcct

SEQ ID NO: 329 - DNA, 16 bp, synthetic construct
  source 1..16: mol_type = other DNA
ataagagctgtctcct

SEQ ID NO: 330 - DNA, 16 bp, synthetic construct
  source 1..16: mol_type = other DNA
ctagtaaatgcttgtc

SEQ ID NO: 331 - DNA, 16 bp, synthetic construct
  source 1..16: mol_type = other DNA
ctaatatttctacagc

SEQ ID NO: 332 - DNA, 16 bp, synthetic construct
  source 1..16: mol_type = other DNA
ctcttagtgtccccat

SEQ ID NO: 333 - DNA, 16 bp, synthetic construct
  source 1..16: mol_type = other DNA
ttccatcacaaggcct

SEQ ID NO: 334 - DNA, 16 bp, synthetic construct
  source 1..16: mol_type = other DNA
tccataatgcacaaga

SEQ ID NO: 335 - DNA, 16 bp, synthetic construct
  source 1..16: mol_type = other DNA
tgtagctggtttgtgg

SEQ ID NO: 336 - DNA, 16 bp, synthetic construct
  source 1..16: mol_type = other DNA
aacagctacatcaggc

SEQ ID NO: 337 - DNA, 16 bp, synthetic construct
  source 1..16: mol_type = other DNA
ggcattgcacatagac

SEQ ID NO: 338 - DNA, 16 bp, synthetic construct
  source 1..16: mol_type = other DNA
gtaagcaatgcagcca

SEQ ID NO: 339 - DNA, 16 bp, synthetic construct
  source 1..16: mol_type = other DNA
ttagaaattgcagtgc

SEQ ID NO: 340 - DNA, 16 bp, synthetic construct
  source 1..16: mol_type = other DNA
aggtattaaactgcca

SEQ ID NO: 341 - DNA, 16 bp, synthetic construct
  source 1..16: mol_type = other DNA
gtcctaagagcactca

SEQ ID NO: 342 - DNA, 16 bp, synthetic construct
  source 1..16: mol_type = other DNA
gataaatctgcaagag

SEQ ID NO: 343 - DNA, 16 bp, synthetic construct
  source 1..16: mol_type = other DNA
gggacttacactgaaa

SEQ ID NO: 344 - DNA, 16 bp, synthetic construct
  source 1..16: mol_type = other DNA
gtcaacgcagactgct

SEQ ID NO: 345 - DNA, 16 bp, synthetic construct
  source 1..16: mol_type = other DNA
cgcccccctcggacca

SEQ ID NO: 346 - DNA, 16 bp, synthetic construct
  source 1..16: mol_type = other DNA
gcctcagtgtctcggc

SEQ ID NO: 347 - DNA, 16 bp, synthetic construct
  source 1..16: mol_type = other DNA
gaatcggctcgggtcc

SEQ ID NO: 348 - DNA, 16 bp, synthetic construct
  source 1..16: mol_type = other DNA
ggacaagctccagccg

SEQ ID NO: 349 - DNA, 16 bp, synthetic construct
  source 1..16: mol_type = other DNA
tcgctcaggcagcggg

SEQ ID NO: 350 - DNA, 16 bp, synthetic construct
  source 1..16: mol_type = other DNA
gctccagcgggatacc

SEQ ID NO: 351 - DNA, 16 bp, synthetic construct
  source 1..16: mol_type = other DNA
tggccttccgcacaag

SEQ ID NO: 352 - DNA, 16 bp, synthetic construct
  source 1..16: mol_type = other DNA
taagttgaaggatgga

SEQ ID NO: 353 - DNA, 16 bp, synthetic construct
  source 1..16: mol_type = other DNA
agagaccctgtcggag

SEQ ID NO: 354 - DNA, 16 bp, synthetic construct
  source 1..16: mol_type = other DNA
agatgagctggtggac

SEQ ID NO: 355 - DNA, 16 bp, synthetic construct
  source 1..16: mol_type = other DNA
aagagagatgcctatt

SEQ ID NO: 356 - DNA, 16 bp, synthetic construct
  source 1..16: mol_type = other DNA
ggaccgaaagtcagac

SEQ ID NO: 357 - DNA, 16 bp, synthetic construct
  source 1..16: mol_type = other DNA
gttgttttggcatcaa

SEQ ID NO: 358 - DNA, 16 bp, synthetic construct
  source 1..16: mol_type = other DNA
ggacttgactttaggg

SEQ ID NO: 359 - DNA, 16 bp, synthetic construct
  source 1..16: mol_type = other DNA
tcgagagaaggtagag

SEQ ID NO: 360 - DNA, 16 bp, synthetic construct
  source 1..16: mol_type = other DNA
cctcgaaggcatatct

SEQ ID NO: 361 - DNA, 16 bp, synthetic construct
  source 1..16: mol_type = other DNA
gatgacttcaggcctg

SEQ ID NO: 362 - DNA, 16 bp, synthetic construct
  source 1..16: mol_type = other DNA
tgggcatggcgacctc

SEQ ID NO: 363 - DNA, 16 bp, synthetic construct
  source 1..16: mol_type = other DNA
cagccaaggcagccga

SEQ ID NO: 364 - DNA, 16 bp, synthetic construct
  source 1..16: mol_type = other DNA
agcgagcctgggcgag

SEQ ID NO: 365 - DNA, 16 bp, synthetic construct
  source 1..16: mol_type = other DNA
tgctcatgtatccacc

SEQ ID NO: 366 - DNA, 16 bp, synthetic construct
  source 1..16: mol_type = other DNA
agggcagcattacata

SEQ ID NO: 367 - DNA, 16 bp, synthetic construct
  source 1..16: mol_type = other DNA
tatctggaagccatgt

SEQ ID NO: 368 - DNA, 16 bp, synthetic construct
  source 1..16: mol_type = other DNA
cactcgagtgaacacc

SEQ ID NO: 369 - DNA, 16 bp, synthetic construct
  source 1..16: mol_type = other DNA
ggcctgttggctgctc

SEQ ID NO: 370 - DNA, 16 bp, synthetic construct
  source 1..16: mol_type = other DNA
gtctctgctggacagc

SEQ ID NO: 371 - DNA, 16 bp, synthetic construct
  source 1..16: mol_type = other DNA
gtactttattgcccaa

SEQ ID NO: 372 - DNA, 16 bp, synthetic construct
  source 1..16: mol_type = other DNA
gactcacagactcttc

SEQ ID NO: 373 - DNA, 16 bp, synthetic construct
  source 1..16: mol_type = other DNA
gaatctgctagactcg

SEQ ID NO: 374 - DNA, 16 bp, synthetic construct
  source 1..16: mol_type = other DNA
acagcaatgcggaggt

SEQ ID NO: 375 - DNA, 16 bp, synthetic construct
  source 1..16: mol_type = other DNA
cgaaaggttgcttcct

SEQ ID NO: 376 - DNA, 16 bp, synthetic construct
  source 1..16: mol_type = other DNA
agtgctggaccgctgc

SEQ ID NO: 377 - DNA, 16 bp, synthetic construct
  source 1..16: mol_type = other DNA
taacgcatgctgatgt

SEQ ID NO: 378 - DNA, 16 bp, synthetic construct
  source 1..16: mol_type = other DNA
ggcttcctggtgtcat

SEQ ID NO: 379 - DNA, 16 bp, synthetic construct
  source 1..16: mol_type = other DNA
ggccacgaaacagtca

SEQ ID NO: 380 - DNA, 16 bp, synthetic construct
  source 1..16: mol_type = other DNA
tcatgctggaacagtc

SEQ ID NO: 381 - DNA, 16 bp, synthetic construct
  source 1..16: mol_type = other DNA
tcacaaggcccccacc

SEQ ID NO: 382 - DNA, 16 bp, synthetic construct
  source 1..16: mol_type = other DNA
atgggccagcctaccc

SEQ ID NO: 383 - DNA, 16 bp, synthetic construct
  source 1..16: mol_type = other DNA
cgaactgcaccccttc

SEQ ID NO: 384 - DNA, 16 bp, synthetic construct
  source 1..16: mol_type = other DNA
ggttatcatctttgca

SEQ ID NO: 385 - DNA, 16 bp, synthetic construct
  source 1..16: mol_type = other DNA
tcttgttacccccgcc

SEQ ID NO: 386 - DNA, 16 bp, synthetic construct
  source 1..16: mol_type = other DNA
atctcactgattcaca

SEQ ID NO: 387 - DNA, 16 bp, synthetic construct
  source 1..16: mol_type = other DNA
gccctgcacactagat

SEQ ID NO: 388 - DNA, 16 bp, synthetic construct
  source 1..16: mol_type = other DNA
ggaggcggaagctcct

SEQ ID NO: 389 - DNA, 16 bp, synthetic construct
  source 1..16: mol_type = other DNA
gccaggttcaagttgt

SEQ ID NO: 390 - DNA, 16 bp, synthetic construct
  source 1..16: mol_type = other DNA
caaatgtacggaatct

SEQ ID NO: 391 - DNA, 16 bp, synthetic construct
  source 1..16: mol_type = other DNA
tactttaggctcctgg

SEQ ID NO: 392 - DNA, 16 bp, synthetic construct
  source 1..16: mol_type = other DNA
agcattagagctttgg

SEQ ID NO: 393 - DNA, 16 bp, synthetic construct
  source 1..16: mol_type = other DNA
tctactatgggagcca

SEQ ID NO: 394 - DNA, 16 bp, synthetic construct
  source 1..16: mol_type = other DNA
ggacaggttccttgga

SEQ ID NO: 395 - DNA, 16 bp, synthetic construct
  source 1..16: mol_type = other DNA
ctagatcggtgctgtt

SEQ ID NO: 396 - DNA, 16 bp, synthetic construct
  source 1..16: mol_type = other DNA
agttataggcgagagc

SEQ ID NO: 397 - DNA, 16 bp, synthetic construct
  source 1..16: mol_type = other DNA
actatataaccacagc

SEQ ID NO: 398 - DNA, 16 bp, synthetic construct
  source 1..16: mol_type = other DNA
gacaataagagctgtc

SEQ ID NO: 399 - DNA, 16 bp, synthetic construct
  source 1..16: mol_type = other DNA
gctagtaaatgcttgt

SEQ ID NO: 400 - DNA, 16 bp, synthetic construct
  source 1..16: mol_type = other DNA
ccaacttttagtatta

SEQ ID NO: 401 - DNA, 16 bp, synthetic construct
  source 1..16: mol_type = other DNA
agccatctcttagtgt

SEQ ID NO: 402 - DNA, 16 bp, synthetic construct
  source 1..16: mol_type = other DNA
tctgatgtcgaagagg

SEQ ID NO: 403 - DNA, 16 bp, synthetic construct
  source 1..16: mol_type = other DNA
tcccatgtggcagtac

SEQ ID NO: 404 - DNA, 16 bp, synthetic construct
  source 1..16: mol_type = other DNA
tccaaatgcccaactc

SEQ ID NO: 405 - DNA, 16 bp, synthetic construct
  source 1..16: mol_type = other DNA
gcaaataatgtgcaca

SEQ ID NO: 406 - DNA, 16 bp, synthetic construct
  source 1..16: mol_type = other DNA
gggcattgcacataga

SEQ ID NO: 407 - DNA, 16 bp, synthetic construct
  source 1..16: mol_type = other DNA
gtagtaagcaatgcag

SEQ ID NO: 408 - DNA, 16 bp, synthetic construct
  source 1..16: mol_type = other DNA
cttagaaattgcagtg

SEQ ID NO: 409 - DNA, 16 bp, synthetic construct
  source 1..16: mol_type = other DNA
attttaacagctcagg

SEQ ID NO: 410 - DNA, 16 bp, synthetic construct
  source 1..16: mol_type = other DNA
tatgacatttcagagt

SEQ ID NO: 411 - DNA, 16 bp, synthetic construct
  source 1..16: mol_type = other DNA
agtacaagcgcagcct

SEQ ID NO: 412 - DNA, 16 bp, synthetic construct
  source 1..16: mol_type = other DNA
acaaggacaagcccac

SEQ ID NO: 413 - DNA, 16 bp, synthetic construct
  source 1..16: mol_type = other DNA
gaagtagcggcatccc

SEQ ID NO: 414 - DNA, 16 bp, synthetic construct
  source 1..16: mol_type = other DNA
ccgcccccctcggacc

SEQ ID NO: 415 - DNA, 16 bp, synthetic construct
  source 1..16: mol_type = other DNA
tgcctcagtgtctcgg

SEQ ID NO: 416 - DNA, 16 bp, synthetic construct
  source 1..16: mol_type = other DNA
ggaatcggctcgggtc

SEQ ID NO: 417 - DNA, 16 bp, synthetic construct
  source 1..16: mol_type = other DNA
aaggacaagctccagc

SEQ ID NO: 418 - DNA, 16 bp, synthetic construct
  source 1..16: mol_type = other DNA
ctcgctcaggcagcgg

SEQ ID NO: 419 - DNA, 16 bp, synthetic construct
  source 1..16: mol_type = other DNA
tgctccagcgggatac

SEQ ID NO: 420 - DNA, 16 bp, synthetic construct
  source 1..16: mol_type = other DNA
ctggccttccgcacaa

SEQ ID NO: 421 - DNA, 16 bp, synthetic construct
  source 1..16: mol_type = other DNA
cttaagttgaaggatg

SEQ ID NO: 422 - DNA, 16 bp, synthetic construct
  source 1..16: mol_type = other DNA
cagagaccctgtcgga

SEQ ID NO: 423 - DNA, 16 bp, synthetic construct
  source 1..16: mol_type = other DNA
cggagatgagctggtg

SEQ ID NO: 424 - DNA, 16 bp, synthetic construct
  source 1..16: mol_type = other DNA
taagagagatgcctat

SEQ ID NO: 425 - DNA, 16 bp, synthetic construct
  source 1..16: mol_type = other DNA
tggaccgaaagtcaga

SEQ ID NO: 426 - DNA, 16 bp, synthetic construct
  source 1..16: mol_type = other DNA
ggttgttttggcatca

SEQ ID NO: 427 - DNA, 16 bp, synthetic construct
  source 1..16: mol_type = other DNA
tggacttgactttagg

SEQ ID NO: 428 - DNA, 16 bp, synthetic construct
  source 1..16: mol_type = other DNA
ctcgagagaaggtaga

SEQ ID NO: 429 - DNA, 16 bp, synthetic construct
  source 1..16: mol_type = other DNA
tcctcgaaggcatatc

SEQ ID NO: 430 - DNA, 16 bp, synthetic construct
  source 1..16: mol_type = other DNA
ggatgacttcaggcct

SEQ ID NO: 431 - DNA, 16 bp, synthetic construct
  source 1..16: mol_type = other DNA
ctgggcatggcgacct

SEQ ID NO: 432 - DNA, 16 bp, synthetic construct
  source 1..16: mol_type = other DNA
acagccaaggcagccg

SEQ ID NO: 433 - DNA, 16 bp, synthetic construct
  source 1..16: mol_type = other DNA
tagcgagcctgggcga

SEQ ID NO: 434 - DNA, 16 bp, synthetic construct
  source 1..16: mol_type = other DNA
caagttgcaaatcttg

SEQ ID NO: 435 - DNA, 16 bp, synthetic construct
  source 1..16: mol_type = other DNA
cagggcagcattacat

SEQ ID NO: 436 - DNA, 16 bp, synthetic construct
  source 1..16: mol_type = other DNA
tcgggcatatctggaa

SEQ ID NO: 437 - DNA, 16 bp, synthetic construct
  source 1..16: mol_type = other DNA
gcactcgagtgaacac

SEQ ID NO: 438 - DNA, 16 bp, synthetic construct
  source 1..16: mol_type = other DNA
aggcctgttggctgct

SEQ ID NO: 439 - DNA, 16 bp, synthetic construct
  source 1..16: mol_type = other DNA
ttggtctctgctggac

SEQ ID NO: 440 - DNA, 16 bp, synthetic construct
  source 1..16: mol_type = other DNA
ggtactttattgccca

SEQ ID NO: 441 - DNA, 16 bp, synthetic construct
  source 1..16: mol_type = other DNA
gtgactcacagactct

SEQ ID NO: 442 - DNA, 16 bp, synthetic construct
  source 1..16: mol_type = other DNA
agaatctgctagactc

SEQ ID NO: 443 - DNA, 16 bp, synthetic construct
  source 1..16: mol_type = other DNA
cacagcaatgcggagg

SEQ ID NO: 444 - DNA, 16 bp, synthetic construct
  source 1..16: mol_type = other DNA
gcgaaaggttgcttcc

SEQ ID NO: 445 - DNA, 16 bp, synthetic construct
  source 1..16: mol_type = other DNA
aagtgctggaccgctg

SEQ ID NO: 446 - DNA, 16 bp, synthetic construct
  source 1..16: mol_type = other DNA
ttaacgcatgctgatg

SEQ ID NO: 447 - DNA, 16 bp, synthetic construct
  source 1..16: mol_type = other DNA
gggcttcctggtgtca

SEQ ID NO: 448 - DNA, 16 bp, synthetic construct
  source 1..16: mol_type = other DNA
gggccacgaaacagtc

SEQ ID NO: 449 - DNA, 16 bp, synthetic construct
  source 1..16: mol_type = other DNA
ctcatgctggaacagt

SEQ ID NO: 450 - DNA, 16 bp, synthetic construct
  source 1..16: mol_type = other DNA
atcacaaggcccccac

SEQ ID NO: 451 - DNA, 16 bp, synthetic construct
  source 1..16: mol_type = other DNA
catgggccagcctacc

SEQ ID NO: 452 - DNA, 16 bp, synthetic construct
  source 1..16: mol_type = other DNA
acgaactgcacccctt

SEQ ID NO: 453 - DNA, 16 bp, synthetic construct
  source 1..16: mol_type = other DNA
aggttatcatctttgc

SEQ ID NO: 454 - DNA, 16 bp, synthetic construct
  source 1..16: mol_type = other DNA
atcttgttacccccgc

SEQ ID NO: 455 - DNA, 16 bp, synthetic construct
  source 1..16: mol_type = other DNA
catctcactgattcac

SEQ ID NO: 456 - DNA, 16 bp, synthetic construct
  source 1..16: mol_type = other DNA
tgccctgcacactaga

SEQ ID NO: 457 - DNA, 16 bp, synthetic construct
  source 1..16: mol_type = other DNA
gaggaggcggaagctc

SEQ ID NO: 458 - DNA, 16 bp, synthetic construct
  source 1..16: mol_type = other DNA
agccaggttcaagttg

SEQ ID NO: 459 - DNA, 16 bp, synthetic construct
  source 1..16: mol_type = other DNA
tcaaatgtacggaatc

SEQ ID NO: 460 - DNA, 16 bp, synthetic construct
  source 1..16: mol_type = other DNA
gtactttaggctcctg

SEQ ID NO: 461 - DNA, 16 bp, synthetic construct
  source 1..16: mol_type = other DNA
acatatcagcattaga

SEQ ID NO: 462 - DNA, 16 bp, synthetic construct
  source 1..16: mol_type = other DNA
gtctactatgggagcc

SEQ ID NO: 463 - DNA, 16 bp, synthetic construct
  source 1..16: mol_type = other DNA
gaagatgcatagagga

SEQ ID NO: 464 - DNA, 16 bp, synthetic construct
  source 1..16: mol_type = other DNA
tcacactgggtcacca

SEQ ID NO: 465 - DNA, 16 bp, synthetic construct
  source 1..16: mol_type = other DNA
ggcaatcagggaggca

SEQ ID NO: 466 - DNA, 16 bp, synthetic construct
  source 1..16: mol_type = other DNA
tgactatataaccaca

SEQ ID NO: 467 - DNA, 16 bp, synthetic construct
  source 1..16: mol_type = other DNA
cccaattgccactagg

SEQ ID NO: 468 - DNA, 16 bp, synthetic construct
  source 1..16: mol_type = other DNA
tctttaccaagaccgc

SEQ ID NO: 469 - DNA, 16 bp, synthetic construct
  source 1..16: mol_type = other DNA
gacaaattcatcaacc

SEQ ID NO: 470 - DNA, 16 bp, synthetic construct
  source 1..16: mol_type = other DNA
ctgtatccaaaaggcc

SEQ ID NO: 471 - DNA, 16 bp, synthetic construct
  source 1..16: mol_type = other DNA
atacatagcagagcca

SEQ ID NO: 472 - DNA, 16 bp, synthetic construct
  source 1..16: mol_type = other DNA
caccctatcgctccca

SEQ ID NO: 473 - DNA, 16 bp, synthetic construct
  source 1..16: mol_type = other DNA
agttatgtctgactca

SEQ ID NO: 474 - DNA, 16 bp, synthetic construct
  source 1..16: mol_type = other DNA
aatataccccacagca

SEQ ID NO: 475 - DNA, 16 bp, synthetic construct
  source 1..16: mol_type = other DNA
gtgcatgtgtggcttg

SEQ ID NO: 476 - DNA, 16 bp, synthetic construct
  source 1..16: mol_type = other DNA
tgtagtaagcaatgca

SEQ ID NO: 477 - DNA, 16 bp, synthetic construct
  source 1..16: mol_type = other DNA
catatattgcggatga

SEQ ID NO: 478 - DNA, 16 bp, synthetic construct
  source 1..16: mol_type = other DNA
gttattttaacagctc

SEQ ID NO: 479 - DNA, 16 bp, synthetic construct
  source 1..16: mol_type = other DNA
ataaggacttacacca

SEQ ID NO: 480 - DNA, 16 bp, synthetic construct
  source 1..16: mol_type = other DNA
cagcatgcaaccaccc

SEQ ID NO: 481 - DNA, 16 bp, synthetic construct
  source 1..16: mol_type = other DNA
tgggatgctaggacaa

SEQ ID NO: 482 - DNA, 16 bp, synthetic construct
  source 1..16: mol_type = other DNA
ggaagtagcggcatcc

SEQ ID NO: 483 - DNA, 16 bp, synthetic construct
  source 1..16: mol_type = other DNA
cattcccagcgcgacg

SEQ ID NO: 484 - DNA, 16 bp, synthetic construct
  source 1..16: mol_type = other DNA
taccctgcctcagtgt

SEQ ID NO: 485 - DNA, 16 bp, synthetic construct
  source 1..16: mol_type = other DNA
tcgggaatcggctcgg

SEQ ID NO: 486 - DNA, 16 bp, synthetic construct
  source 1..16: mol_type = other DNA
cgaaggacaagctcca

SEQ ID NO: 487 - DNA, 16 bp, synthetic construct
  source 1..16: mol_type = other DNA
gctcgctcaggcagcg

SEQ ID NO: 488 - DNA, 16 bp, synthetic construct
  source 1..16: mol_type = other DNA
ctgctccagcgggata

SEQ ID NO: 489 - DNA, 16 bp, synthetic construct
  source 1..16: mol_type = other DNA
cctggccttccgcaca

SEQ ID NO: 490 - DNA, 16 bp, synthetic construct
  source 1..16: mol_type = other DNA
gcttaagttgaaggat

SEQ ID NO: 491 - DNA, 16 bp, synthetic construct
  source 1..16: mol_type = other DNA
gcagagaccctgtcgg

SEQ ID NO: 492 - DNA, 16 bp, synthetic construct
  source 1..16: mol_type = other DNA
ccggagatgagctggt

SEQ ID NO: 493 - DNA, 16 bp, synthetic construct
  source 1..16: mol_type = other DNA
gtaagagagatgccta

SEQ ID NO: 494 - DNA, 16 bp, synthetic construct
  source 1..16: mol_type = other DNA
ttggaccgaaagtcag

SEQ ID NO: 495 - DNA, 16 bp, synthetic construct
  source 1..16: mol_type = other DNA
tggttgttttggcatc

SEQ ID NO: 496 - DNA, 16 bp, synthetic construct
  source 1..16: mol_type = other DNA
gtggacttgactttag

SEQ ID NO: 497 - DNA, 16 bp, synthetic construct
  source 1..16: mol_type = other DNA
tctcgagagaaggtag

SEQ ID NO: 498 - DNA, 16 bp, synthetic construct
  source 1..16: mol_type = other DNA
atcctcgaaggcatat

SEQ ID NO: 499 - DNA, 16 bp, synthetic construct
  source 1..16: mol_type = other DNA
tgaggatgacttcagg

SEQ ID NO: 500 - DNA, 16 bp, synthetic construct
  source 1..16: mol_type = other DNA
gctgggcatggcgacc

SEQ ID NO: 501 - DNA, 16 bp, synthetic construct
  source 1..16: mol_type = other DNA
tagcagctcatctccc

SEQ ID NO: 502 - DNA, 16 bp, synthetic construct
  source 1..16: mol_type = other DNA
gtagcgagcctgggcg

SEQ ID NO: 503 - DNA, 16 bp, synthetic construct
  source 1..16: mol_type = other DNA
tagcaagttgcaaatc

SEQ ID NO: 504 - DNA, 16 bp, synthetic construct
  source 1..16: mol_type = other DNA
acagggcagcattaca

SEQ ID NO: 505 - DNA, 16 bp, synthetic construct
  source 1..16: mol_type = other DNA
cgtcgggcatatctgg

SEQ ID NO: 506 - DNA, 16 bp, synthetic construct
  source 1..16: mol_type = other DNA
cagcactcgagtgaac

SEQ ID NO: 507 - DNA, 16 bp, synthetic construct
  source 1..16: mol_type = other DNA
gaggcctgttggctgc

SEQ ID NO: 508 - DNA, 16 bp, synthetic construct
  source 1..16: mol_type = other DNA
gaggatggaccgcggg

SEQ ID NO: 509 - DNA, 16 bp, synthetic construct
  source 1..16: mol_type = other DNA
gcaggtactttattgc

SEQ ID NO: 510 - DNA, 16 bp, synthetic construct
  source 1..16: mol_type = other DNA
agtgactcacagactc

SEQ ID NO: 511 - DNA, 16 bp, synthetic construct
  source 1..16: mol_type = other DNA
aagaatctgctagact

SEQ ID NO: 512 - DNA, 16 bp, synthetic construct
  source 1..16: mol_type = other DNA
acacagcaatgcggag

SEQ ID NO: 513 - DNA, 16 bp, synthetic construct
  source 1..16: mol_type = other DNA
ggcgaaaggttgcttc

SEQ ID NO: 514 - DNA, 16 bp, synthetic construct
  source 1..16: mol_type = other DNA
taagtgctggaccgct

SEQ ID NO: 515 - DNA, 16 bp, synthetic construct
  source 1..16: mol_type = other DNA
attaacgcatgctgat

SEQ ID NO: 516 - DNA, 16 bp, synthetic construct
  source 1..16: mol_type = other DNA
tgggcttcctggtgtc

SEQ ID NO: 517 - DNA, 16 bp, synthetic construct
  source 1..16: mol_type = other DNA
agggccacgaaacagt

SEQ ID NO: 518 - DNA, 16 bp, synthetic construct
  source 1..16: mol_type = other DNA
acctcatgctggaaca

SEQ ID NO: 519 - DNA, 16 bp, synthetic construct
  source 1..16: mol_type = other DNA
catcacaaggccccca

SEQ ID NO: 520 - DNA, 16 bp, synthetic construct
  source 1..16: mol_type = other DNA
acatgggccagcctac

SEQ ID NO: 521 - DNA, 16 bp, synthetic construct
  source 1..16: mol_type = other DNA
gacgaactgcacccct

SEQ ID NO: 522 - DNA, 16 bp, synthetic construct
  source 1..16: mol_type = other DNA
tcaaggttatcatctt

SEQ ID NO: 523 - DNA, 16 bp, synthetic construct
  source 1..16: mol_type = other DNA
catcttgttacccccg

SEQ ID NO: 524 - DNA, 16 bp, synthetic construct
  source 1..16: mol_type = other DNA
ctaacatctcactgat

SEQ ID NO: 525 - DNA, 16 bp, synthetic construct
  source 1..16: mol_type = other DNA
atgccctgcacactag

SEQ ID NO: 526 - DNA, 16 bp, synthetic construct
  source 1..16: mol_type = other DNA
agaggaggcggaagct

SEQ ID NO: 527 - DNA, 16 bp, synthetic construct
  source 1..16: mol_type = other DNA
aagccaggttcaagtt

SEQ ID NO: 528 - DNA, 16 bp, synthetic construct
  source 1..16: mol_type = other DNA
attaggacaagattca

SEQ ID NO: 529 - DNA, 16 bp, synthetic construct
  source 1..16: mol_type = other DNA
tgtactttaggctcct

SEQ ID NO: 530 - DNA, 16 bp, synthetic construct
  source 1..16: mol_type = other DNA
aacatatcagcattag

SEQ ID NO: 531 - DNA, 16 bp, synthetic construct
  source 1..16: mol_type = other DNA
caaggatgccaccaac

SEQ ID NO: 532 - DNA, 16 bp, synthetic construct
  source 1..16: mol_type = other DNA
tcattatggaagatgc

SEQ ID NO: 533 - DNA, 16 bp, synthetic construct
  source 1..16: mol_type = other DNA
ttaacaaccctgtcag

SEQ ID NO: 534 - DNA, 16 bp, synthetic construct
  source 1..16: mol_type = other DNA
gtaactggtagctcct

SEQ ID NO: 535 - DNA, 16 bp, synthetic construct
  source 1..16: mol_type = other DNA
acccatactgcacccc

SEQ ID NO: 536 - DNA, 16 bp, synthetic construct
  source 1..16: mol_type = other DNA
gcctatcccaattgcc

SEQ ID NO: 537 - DNA, 16 bp, synthetic construct
  source 1..16: mol_type = other DNA
gtctttaccaagaccg

SEQ ID NO: 538 - DNA, 16 bp, synthetic construct
  source 1..16: mol_type = other DNA
aacgacaaattcatca

SEQ ID NO: 539 - DNA, 16 bp, synthetic construct
  source 1..16: mol_type = other DNA
tgcaatccccctgtat

SEQ ID NO: 540 - DNA, 16 bp, synthetic construct
  source 1..16: mol_type = other DNA
aatacatagcagagcc

SEQ ID NO: 541 - DNA, 16 bp, synthetic construct
  source 1..16: mol_type = other DNA
tgtcatggttgcctca

SEQ ID NO: 542 - DNA, 16 bp, synthetic construct
  source 1..16: mol_type = other DNA
ataaggagttatgtct

SEQ ID NO: 543 - DNA, 16 bp, synthetic construct
  source 1..16: mol_type = other DNA
gaatataccccacagc

SEQ ID NO: 544 - DNA, 16 bp, synthetic construct
  source 1..16: mol_type = other DNA
gttacaggtgcatgtg

SEQ ID NO: 545 - DNA, 16 bp, synthetic construct
  source 1..16: mol_type = other DNA
agtcatctggagtcac

SEQ ID NO: 546 - DNA, 16 bp, synthetic construct
  source 1..16: mol_type = other DNA
tcagacaacccactga

SEQ ID NO: 547 - DNA, 16 bp, synthetic construct
  source 1..16: mol_type = other DNA
aggaatctgaatccta

SEQ ID NO: 548 - DNA, 16 bp, synthetic construct
  source 1..16: mol_type = other DNA
gataatttcctagagc

SEQ ID NO: 549 - DNA, 16 bp, synthetic construct
  source 1..16: mol_type = other DNA
gaaataagtgctcagg

SEQ ID NO: 550 - DNA, 16 bp, synthetic construct
  source 1..16: mol_type = other DNA
ctccaatctgatgact

SEQ ID NO: 551 - DNA, 16 bp, synthetic construct
  source 1..16: mol_type = other DNA
gaattcaggaagtagc

SEQ ID NO: 552 - DNA, 16 bp, synthetic construct
  source 1..16: mol_type = other DNA
gcattcccagcgcgac

SEQ ID NO: 553 - DNA, 16 bp, synthetic construct
  source 1..16: mol_type = other DNA
gctctctaccctgcct

SEQ ID NO: 554 - DNA, 16 bp, synthetic construct
  source 1..16: mol_type = other DNA
atcgggaatcggctcg

SEQ ID NO: 555 - DNA, 16 bp, synthetic construct
  source 1..16: mol_type = other DNA
ccgcgaaggacaagct

SEQ ID NO: 556 - DNA, 16 bp, synthetic construct
  source 1..16: mol_type = other DNA
tgctcgctcaggcagc

SEQ ID NO: 557 - DNA, 16 bp, synthetic construct
  source 1..16: mol_type = other DNA
tctgctccagcgggat

SEQ ID NO: 558 - DNA, 16 bp, synthetic construct
  source 1..16: mol_type = other DNA
ctcctggccttccgca

SEQ ID NO: 559 - DNA, 16 bp, synthetic construct
  source 1..16: mol_type = other DNA
ttgcttaagttgaagg

SEQ ID NO: 560 - DNA, 16 bp, synthetic construct
  source 1..16: mol_type = other DNA
tgcagagaccctgtcg

SEQ ID NO: 561 - DNA, 16 bp, synthetic construct
  source 1..16: mol_type = other DNA
gccggagatgagctgg

SEQ ID NO: 562 - DNA, 16 bp, synthetic construct
  source 1..16: mol_type = other DNA
ggtaagagagatgcct

SEQ ID NO: 563 - DNA, 16 bp, synthetic construct
  source 1..16: mol_type = other DNA
tttggaccgaaagtca

SEQ ID NO: 564 - DNA, 16 bp, synthetic construct
  source 1..16: mol_type = other DNA
atggttgttttggcat

SEQ ID NO: 565 - DNA, 16 bp, synthetic construct
  source 1..16: mol_type = other DNA
cgtggacttgacttta

SEQ ID NO: 566 - DNA, 16 bp, synthetic construct
  source 1..16: mol_type = other DNA
ctctcgagagaaggta

SEQ ID NO: 567 - DNA, 16 bp, synthetic construct
  source 1..16: mol_type = other DNA
tatcctcgaaggcata

SEQ ID NO: 568 - DNA, 16 bp, synthetic construct
  source 1..16: mol_type = other DNA
ttctgaggatgacttc

SEQ ID NO: 569 - DNA, 16 bp, synthetic construct
  source 1..16: mol_type = other DNA
ttgcccagctgggcat

SEQ ID NO: 570 - DNA, 16 bp, synthetic construct
  source 1..16: mol_type = other DNA
ctagcagctcatctcc

SEQ ID NO: 571 - DNA, 16 bp, synthetic construct
  source 1..16: mol_type = other DNA
tgtagcgagcctgggc

SEQ ID NO: 572 - DNA, 16 bp, synthetic construct
  source 1..16: mol_type = other DNA
gtagcaagttgcaaat

SEQ ID NO: 573 - DNA, 16 bp, synthetic construct
  source 1..16: mol_type = other DNA
tacagggcagcattac

SEQ ID NO: 574 - DNA, 16 bp, synthetic construct
  source 1..16: mol_type = other DNA
caaccacaggacatcg

SEQ ID NO: 575 - DNA, 16 bp, synthetic construct
  source 1..16: mol_type = other DNA
tcagcactcgagtgaa

SEQ ID NO: 576 - DNA, 16 bp, synthetic construct
  source 1..16: mol_type = other DNA
ggaggcctgttggctg

SEQ ID NO: 577 - DNA, 16 bp, synthetic construct
  source 1..16: mol_type = other DNA
tgaggatggaccgcgg

SEQ ID NO: 578 - DNA, 16 bp, synthetic construct
  source 1..16: mol_type = other DNA
accagcaggtacttta

SEQ ID NO: 579 - DNA, 16 bp, synthetic construct
  source 1..16: mol_type = other DNA
aagtgactcacagact

SEQ ID NO: 580 - DNA, 16 bp, synthetic construct
  source 1..16: mol_type = other DNA
aaagaatctgctagac

SEQ ID NO: 581 - DNA, 16 bp, synthetic construct
  source 1..16: mol_type = other DNA
tacacagcaatgcgga

SEQ ID NO: 582 - DNA, 16 bp, synthetic construct
  source 1..16: mol_type = other DNA
aggcgaaaggttgctt

SEQ ID NO: 583 - DNA, 16 bp, synthetic construct
  source 1..16: mol_type = other DNA
ttaagtgctggaccgc

SEQ ID NO: 584 - DNA, 16 bp, synthetic construct
  source 1..16: mol_type = other DNA
aattaacgcatgctga

SEQ ID NO: 585 - DNA, 16 bp, synthetic construct
  source 1..16: mol_type = other DNA
ggaccctctgcactgg

SEQ ID NO: 586 - DNA, 16 bp, synthetic construct
  source 1..16: mol_type = other DNA
tagggccacgaaacag

SEQ ID NO: 587 - DNA, 16 bp, synthetic construct
  source 1..16: mol_type = other DNA
aacctcatgctggaac

SEQ ID NO: 588 - DNA, 16 bp, synthetic construct
  source 1..16: mol_type = other DNA
ccatcacaaggccccc

SEQ ID NO: 589 - DNA, 16 bp, synthetic construct
  source 1..16: mol_type = other DNA
cacatgggccagccta

SEQ ID NO: 590 - DNA, 16 bp, synthetic construct
  source 1..16: mol_type = other DNA
ggacgaactgcacccc

SEQ ID NO: 591 - DNA, 16 bp, synthetic construct
  source 1..16: mol_type = other DNA
gtcaaggttatcatct

SEQ ID NO: 592 - DNA, 16 bp, synthetic construct
  source 1..16: mol_type = other DNA
tcatcttgttaccccc

SEQ ID NO: 593 - DNA, 16 bp, synthetic construct
  source 1..16: mol_type = other DNA
tactaacatctcactg

SEQ ID NO: 594 - DNA, 16 bp, synthetic construct
  source 1..16: mol_type = other DNA
aatgccctgcacacta

SEQ ID NO: 595 - DNA, 16 bp, synthetic construct
  source 1..16: mol_type = other DNA
gagaggaggcggaagc

SEQ ID NO: 596 - DNA, 16 bp, synthetic construct
  source 1..16: mol_type = other DNA
taagccaggttcaagt

SEQ ID NO: 597 - DNA, 16 bp, synthetic construct
  source 1..16: mol_type = other DNA
tttcattaggacaaga

SEQ ID NO: 598 - DNA, 16 bp, synthetic construct
  source 1..16: mol_type = other DNA
gtgtactttaggctcc

SEQ ID NO: 599 - DNA, 16 bp, synthetic construct
  source 1..16: mol_type = other DNA
gaacatatcagcatta

SEQ ID NO: 600 - DNA, 16 bp, synthetic construct
  source 1..16: mol_type = other DNA
gtaatacttttggcaa

SEQ ID NO: 601 - DNA, 16 bp, synthetic construct
  source 1..16: mol_type = other DNA
ggtattacaaattatc

SEQ ID NO: 602 - DNA, 16 bp, synthetic construct
  source 1..16: mol_type = other DNA
cttaacaaccctgtca

SEQ ID NO: 603 - DNA, 16 bp, synthetic construct
  source 1..16: mol_type = other DNA
agtaactggtagctcc

SEQ ID NO: 604 - DNA, 16 bp, synthetic construct
  source 1..16: mol_type = other DNA
ctaatacccatactgc

SEQ ID NO: 605 - DNA, 16 bp, synthetic construct
  source 1..16: mol_type = other DNA
aactttgcagcctatc

SEQ ID NO: 606 - DNA, 16 bp, synthetic construct
  source 1..16: mol_type = other DNA
agaactaaggcaaatc

SEQ ID NO: 607 - DNA, 16 bp, synthetic construct
  source 1..16: mol_type = other DNA
gtcttggccaacgaca

SEQ ID NO: 608 - DNA, 16 bp, synthetic construct
  source 1..16: mol_type = other DNA
caggatgcaatccccc

SEQ ID NO: 609 - DNA, 16 bp, synthetic construct
  source 1..16: mol_type = other DNA
gccaatacatagcaga

SEQ ID NO: 610 - DNA, 16 bp, synthetic construct
  source 1..16: mol_type = other DNA
gtccatgaaatccagg

SEQ ID NO: 611 - DNA, 16 bp, synthetic construct
  source 1..16: mol_type = other DNA
tctcttagggcacctc

SEQ ID NO: 612 - DNA, 16 bp, synthetic construct
  source 1..16: mol_type = other DNA
tgaatataccccacag

SEQ ID NO: 613 - DNA, 16 bp, synthetic construct
  source 1..16: mol_type = other DNA
agctctaggagtcccc

SEQ ID NO: 614 - DNA, 16 bp, synthetic construct
  source 1..16: mol_type = other DNA
ccagattgagtctcct

SEQ ID NO: 615 - DNA, 16 bp, synthetic construct
  source 1..16: mol_type = other DNA
aatcaagtgccctcca

SEQ ID NO: 616 - DNA, 16 bp, synthetic construct
  source 1..16: mol_type = other DNA
tgtagctgtgtggtgg

SEQ ID NO: 617 - DNA, 16 bp, synthetic construct
  source 1..16: mol_type = other DNA
taccatgatcaggtca

SEQ ID NO: 618 - DNA, 16 bp, synthetic construct
  source 1..16: mol_type = other DNA
gtaaagatgtgagtga

SEQ ID NO: 619 - DNA, 16 bp, synthetic construct
  source 1..16: mol_type = other DNA
gtttacaaaagctgcc

SEQ ID NO: 620 - DNA, 16 bp, synthetic construct
  source 1..16: mol_type = other DNA
tgaactccggctcagt

SEQ ID NO: 621 - DNA, 16 bp, synthetic construct
  source 1..16: mol_type = other DNA
gggcattcccagcgcg

SEQ ID NO: 622 - DNA, 16 bp, synthetic construct
  source 1..16: mol_type = other DNA
cgctctctaccctgcc

SEQ ID NO: 623 - DNA, 16 bp, synthetic construct
  source 1..16: mol_type = other DNA
gatcgggaatcggctc

SEQ ID NO: 624 - DNA, 16 bp, synthetic construct
  source 1..16: mol_type = other DNA
cccgcgaaggacaagc

SEQ ID NO: 625 - DNA, 16 bp, synthetic construct
  source 1..16: mol_type = other DNA
gtcgcggaggaggtgc

SEQ ID NO: 626 - DNA, 16 bp, synthetic construct
  source 1..16: mol_type = other DNA
gtctgctccagcggga

SEQ ID NO: 627 - DNA, 16 bp, synthetic construct
  source 1..16: mol_type = other DNA
actcctggccttccgc

SEQ ID NO: 628 - DNA, 16 bp, synthetic construct
  source 1..16: mol_type = other DNA
cttgcttaagttgaag

SEQ ID NO: 629 - DNA, 16 bp, synthetic construct
  source 1..16: mol_type = other DNA
ttgcagagaccctgtc

SEQ ID NO: 630 - DNA, 16 bp, synthetic construct
  source 1..16: mol_type = other DNA
tgccggagatgagctg

SEQ ID NO: 631 - DNA, 16 bp, synthetic construct
  source 1..16: mol_type = other DNA
tggtaagagagatgcc

SEQ ID NO: 632 - DNA, 16 bp, synthetic construct
  source 1..16: mol_type = other DNA
ctttggaccgaaagtc

SEQ ID NO: 633 - DNA, 16 bp, synthetic construct
  source 1..16: mol_type = other DNA
gatggttgttttggca

SEQ ID NO: 634 - DNA, 16 bp, synthetic construct
  source 1..16: mol_type = other DNA
acatgaagaaagttcg

SEQ ID NO: 635 - DNA, 16 bp, synthetic construct
  source 1..16: mol_type = other DNA
gctctcgagagaaggt

SEQ ID NO: 636 - DNA, 16 bp, synthetic construct
  source 1..16: mol_type = other DNA
atatcctcgaaggcat

SEQ ID NO: 637 - DNA, 16 bp, synthetic construct
  source 1..16: mol_type = other DNA
cccttctgaggatgac

SEQ ID NO: 638 - DNA, 16 bp, synthetic construct
  source 1..16: mol_type = other DNA
gtttgcccagctgggc

SEQ ID NO: 639 - DNA, 16 bp, synthetic construct
  source 1..16: mol_type = other DNA
gtctagcagctcatct

SEQ ID NO: 640 - DNA, 16 bp, synthetic construct
  source 1..16: mol_type = other DNA
ctgtagcgagcctggg

SEQ ID NO: 641 - DNA, 16 bp, synthetic construct
  source 1..16: mol_type = other DNA
ggtagcaagttgcaaa

SEQ ID NO: 642 - DNA, 16 bp, synthetic construct
  source 1..16: mol_type = other DNA
gtacagggcagcatta

SEQ ID NO: 643 - DNA, 16 bp, synthetic construct
  source 1..16: mol_type = other DNA
gcaaccacaggacatc

SEQ ID NO: 644 - DNA, 16 bp, synthetic construct
  source 1..16: mol_type = other DNA
atcagcactcgagtga

SEQ ID NO: 645 - DNA, 16 bp, synthetic construct
  source 1..16: mol_type = other DNA
gggaggcctgttggct

SEQ ID NO: 646 - DNA, 16 bp, synthetic construct
  source 1..16: mol_type = other DNA
ctgaggatggaccgcg

SEQ ID NO: 647 - DNA, 16 bp, synthetic construct
  source 1..16: mol_type = other DNA
caccagcaggtacttt

SEQ ID NO: 648 - DNA, 16 bp, synthetic construct
  source 1..16: mol_type = other DNA
caagtgactcacagac

SEQ ID NO: 649 - DNA, 16 bp, synthetic construct
  source 1..16: mol_type = other DNA
tgaaagaatctgctag

SEQ ID NO: 650 - DNA, 16 bp, synthetic construct
  source 1..16: mol_type = other DNA
ctacacagcaatgcgg

SEQ ID NO: 651 - DNA, 16 bp, synthetic construct
  source 1..16: mol_type = other DNA
caggcgaaaggttgct

SEQ ID NO: 652 - DNA, 16 bp, synthetic construct
  source 1..16: mol_type = other DNA
gttaagtgctggaccg

SEQ ID NO: 653 - DNA, 16 bp, synthetic construct
  source 1..16: mol_type = other DNA
gaattaacgcatgctg

SEQ ID NO: 654 - DNA, 16 bp, synthetic construct
  source 1..16: mol_type = other DNA
gggaccctctgcactg

SEQ ID NO: 655 - DNA, 16 bp, synthetic construct
  source 1..16: mol_type = other DNA
atagggccacgaaaca

SEQ ID NO: 656 - DNA, 16 bp, synthetic construct
  source 1..16: mol_type = other DNA
gaacctcatgctggaa

SEQ ID NO: 657 - DNA, 16 bp, synthetic construct
  source 1..16: mol_type = other DNA
cccatcacaaggcccc

SEQ ID NO: 658 - DNA, 16 bp, synthetic construct
  source 1..16: mol_type = other DNA
tcacacatgggccagc

SEQ ID NO: 659 - DNA, 16 bp, synthetic construct
  source 1..16: mol_type = other DNA
ctgacaggcagtgtcg

SEQ ID NO: 660 - DNA, 16 bp, synthetic construct
  source 1..16: mol_type = other DNA
agtcaaggttatcatc

SEQ ID NO: 661 - DNA, 16 bp, synthetic construct
  source 1..16: mol_type = other DNA
atcatcttgttacccc

SEQ ID NO: 662 - DNA, 16 bp, synthetic construct
  source 1..16: mol_type = other DNA
attctactaacatctc

SEQ ID NO: 663 - DNA, 16 bp, synthetic construct
  source 1..16: mol_type = other DNA
gaatgccctgcacact

SEQ ID NO: 664 - DNA, 16 bp, synthetic construct
  source 1..16: mol_type = other DNA
gctccagtggagagga

SEQ ID NO: 665 - DNA, 16 bp, synthetic construct
  source 1..16: mol_type = other DNA
ataagccaggttcaag

SEQ ID NO: 666 - DNA, 16 bp, synthetic construct
  source 1..16: mol_type = other DNA
gtgagaaacaaaccct

SEQ ID NO: 667 - DNA, 16 bp, synthetic construct
  source 1..16: mol_type = other DNA
tctataccagagtgag

SEQ ID NO: 668 - DNA, 16 bp, synthetic construct
  source 1..16: mol_type = other DNA
aggaatgagtctccca

SEQ ID NO: 669 - DNA, 16 bp, synthetic construct
  source 1..16: mol_type = other DNA
ggtaatacttttggca

SEQ ID NO: 670 - DNA, 16 bp, synthetic construct
  source 1..16: mol_type = other DNA
cgcttatgaaagcatc

SEQ ID NO: 671 - DNA, 16 bp, synthetic construct
  source 1..16: mol_type = other DNA
cccttaacaaccctgt

SEQ ID NO: 672 - DNA, 16 bp, synthetic construct
  source 1..16: mol_type = other DNA
tttgattgtgcagaca

SEQ ID NO: 673 - DNA, 16 bp, synthetic construct
  source 1..16: mol_type = other DNA
tcctaatacccatact

SEQ ID NO: 674 - DNA, 16 bp, synthetic construct
  source 1..16: mol_type = other DNA
acaaactttgcagcct

SEQ ID NO: 675 - DNA, 16 bp, synthetic construct
  source 1..16: mol_type = other DNA
gttagaactaaggcaa

SEQ ID NO: 676 - DNA, 16 bp, synthetic construct
  source 1..16: mol_type = other DNA
gagcagataaatacac

SEQ ID NO: 677 - DNA, 16 bp, synthetic construct
  source 1..16: mol_type = other DNA
tggtatctcgcttcct

SEQ ID NO: 678 - DNA, 16 bp, synthetic construct
  source 1..16: mol_type = other DNA
taaagccacgcagcca

SEQ ID NO: 679 - DNA, 16 bp, synthetic construct
  source 1..16: mol_type = other DNA
ccagatgcaggacccc

SEQ ID NO: 680 - DNA, 16 bp, synthetic construct
  source 1..16: mol_type = other DNA
aaactaatgcacctgg

SEQ ID NO: 681 - DNA, 16 bp, synthetic construct
  source 1..16: mol_type = other DNA
ctgaatataccccaca

SEQ ID NO: 682 - DNA, 16 bp, synthetic construct
  source 1..16: mol_type = other DNA
agctgctatgtgaggc

SEQ ID NO: 683 - DNA, 16 bp, synthetic construct
  source 1..16: mol_type = other DNA
tcagtaaccagattga

SEQ ID NO: 684 - DNA, 16 bp, synthetic construct
  source 1..16: mol_type = other DNA
tttaatcaagtgccct

SEQ ID NO: 685 - DNA, 16 bp, synthetic construct
  source 1..16: mol_type = other DNA
caggatgtagctgtgt

SEQ ID NO: 686 - DNA, 16 bp, synthetic construct
  source 1..16: mol_type = other DNA
taagatcccatcttac

SEQ ID NO: 687 - DNA, 16 bp, synthetic construct
  source 1..16: mol_type = other DNA
aaagtaaacacccacc

SEQ ID NO: 688 - DNA, 16 bp, synthetic construct
  source 1..16: mol_type = other DNA
gcttacaacactaccc

SEQ ID NO: 689 - DNA, 16 bp, synthetic construct
  source 1..16: mol_type = other DNA
gtaatgggagccaggc

SEQ ID NO: 690 - DNA, 16 bp, synthetic construct
  source 1..16: mol_type = other DNA
agggcattcccagcgc

SEQ ID NO: 691 - DNA, 16 bp, synthetic construct
  source 1..16: mol_type = other DNA
gcgctctctaccctgc

SEQ ID NO: 692 - DNA, 16 bp, synthetic construct
  source 1..16: mol_type = other DNA
ggatcgggaatcggct

SEQ ID NO: 693 - DNA, 16 bp, synthetic construct
  source 1..16: mol_type = other DNA
gcccgcgaaggacaag

SEQ ID NO: 694 - DNA, 16 bp, synthetic construct
  source 1..16: mol_type = other DNA
cgtcgcggaggaggtg

SEQ ID NO: 695 - DNA, 16 bp, synthetic construct
  source 1..16: mol_type = other DNA
aggacctgcagagtct

SEQ ID NO: 696 - DNA, 16 bp, synthetic construct
  source 1..16: mol_type = other DNA
cgactcctggccttcc

SEQ ID NO: 697 - DNA, 16 bp, synthetic construct
  source 1..16: mol_type = other DNA
acttgcttaagttgaa

SEQ ID NO: 698 - DNA, 16 bp, synthetic construct
  source 1..16: mol_type = other DNA
gggaggcatttgcaga

SEQ ID NO: 699 - DNA, 16 bp, synthetic construct
  source 1..16: mol_type = other DNA
ttgccggagatgagct

SEQ ID NO: 700 - DNA, 16 bp, synthetic construct
  source 1..16: mol_type = other DNA
tctggtaagagagatg

SEQ ID NO: 701 - DNA, 16 bp, synthetic construct
  source 1..16: mol_type = other DNA
tctttggaccgaaagt

SEQ ID NO: 702 - DNA, 16 bp, synthetic construct
  source 1..16: mol_type = other DNA
tgatggttgttttggc

SEQ ID NO: 703 - DNA, 16 bp, synthetic construct
  source 1..16: mol_type = other DNA
gtccacatgaagaaag

SEQ ID NO: 704 - DNA, 16 bp, synthetic construct
  source 1..16: mol_type = other DNA
agctctcgagagaagg

SEQ ID NO: 705 - DNA, 16 bp, synthetic construct
  source 1..16: mol_type = other DNA
aatatcctcgaaggca

SEQ ID NO: 706 - DNA, 16 bp, synthetic construct
  source 1..16: mol_type = other DNA
gatccatcccttctga

SEQ ID NO: 707 - DNA, 16 bp, synthetic construct
  source 1..16: mol_type = other DNA
tgtttgcccagctggg

SEQ ID NO: 708 - DNA, 16 bp, synthetic construct
  source 1..16: mol_type = other DNA
gacgcaggtggtctag

SEQ ID NO: 709 - DNA, 16 bp, synthetic construct
  source 1..16: mol_type = other DNA
gctgtagcgagcctgg

SEQ ID NO: 710 - DNA, 16 bp, synthetic construct
  source 1..16: mol_type = other DNA
tgggtagcaagttgca

SEQ ID NO: 711 - DNA, 16 bp, synthetic construct
  source 1..16: mol_type = other DNA
ggtacagggcagcatt

SEQ ID NO: 712 - DNA, 16 bp, synthetic construct
  source 1..16: mol_type = other DNA
tgcaaccacaggacat

SEQ ID NO: 713 - DNA, 16 bp, synthetic construct
  source 1..16: mol_type = other DNA
catcagcactcgagtg

SEQ ID NO: 714 - DNA, 16 bp, synthetic construct
  source 1..16: mol_type = other DNA
ctcaggtgtgcatggg

SEQ ID NO: 715 - DNA, 16 bp, synthetic construct
  source 1..16: mol_type = other DNA
cctgaggatggaccgc

SEQ ID NO: 716 - DNA, 16 bp, synthetic construct
  source 1..16: mol_type = other DNA
agcaccagcaggtact

SEQ ID NO: 717 - DNA, 16 bp, synthetic construct
  source 1..16: mol_type = other DNA
tcaagtgactcacaga

SEQ ID NO: 718 - DNA, 16 bp, synthetic construct
  source 1..16: mol_type = other DNA
cacctctgaaagaatc

SEQ ID NO: 719 - DNA, 16 bp, synthetic construct
  source 1..16: mol_type = other DNA
actacacagcaatgcg

SEQ ID NO: 720 - DNA, 16 bp, synthetic construct
  source 1..16: mol_type = other DNA
acaggcgaaaggttgc

SEQ ID NO: 721 - DNA, 16 bp, synthetic construct
  source 1..16: mol_type = other DNA
agttaagtgctggacc

SEQ ID NO: 722 - DNA, 16 bp, synthetic construct
  source 1..16: mol_type = other DNA
gctgaattaacgcatg

SEQ ID NO: 723 - DNA, 16 bp, synthetic construct
  source 1..16: mol_type = other DNA
agggaccctctgcact

SEQ ID NO: 724 - DNA, 16 bp, synthetic construct
  source 1..16: mol_type = other DNA
aatagggccacgaaac

SEQ ID NO: 725 - DNA, 16 bp, synthetic construct
  source 1..16: mol_type = other DNA
agaacctcatgctgga

SEQ ID NO: 726 - DNA, 16 bp, synthetic construct
  source 1..16: mol_type = other DNA
ccccatcacaaggccc

SEQ ID NO: 727 - DNA, 16 bp, synthetic construct
  source 1..16: mol_type = other DNA
atcacacatgggccag

SEQ ID NO: 728 - DNA, 16 bp, synthetic construct
  source 1..16: mol_type = other DNA
cctgacaggcagtgtc

SEQ ID NO: 729 - DNA, 16 bp, synthetic construct
  source 1..16: mol_type = other DNA
tagtcaaggttatcat

SEQ ID NO: 730 - DNA, 16 bp, synthetic construct
  source 1..16: mol_type = other DNA
ttatcatcttgttacc

SEQ ID NO: 731 - DNA, 16 bp, synthetic construct
  source 1..16: mol_type = other DNA
cttattctactaacat

SEQ ID NO: 732 - DNA, 16 bp, synthetic construct
  source 1..16: mol_type = other DNA
tgaatgccctgcacac

SEQ ID NO: 733 - DNA, 16 bp, synthetic construct
  source 1..16: mol_type = other DNA
tgctccagtggagagg

SEQ ID NO: 734 - DNA, 16 bp, synthetic construct
  source 1..16: mol_type = other DNA
gtccctgcagaaaata

SEQ ID NO: 735 - DNA, 16 bp, synthetic construct
  source 1..16: mol_type = other DNA
agcataccacacccca

SEQ ID NO: 736 - DNA, 16 bp, synthetic construct
  source 1..16: mol_type = other DNA
ggacatgctcagcagc

SEQ ID NO: 737 - DNA, 16 bp, synthetic construct
  source 1..16: mol_type = other DNA
tgctgtaggcctcagc

SEQ ID NO: 738 - DNA, 16 bp, synthetic construct
  source 1..16: mol_type = other DNA
tggtaatacttttggc

SEQ ID NO: 739 - DNA, 16 bp, synthetic construct
  source 1..16: mol_type = other DNA
gtaaatggagtccttc

SEQ ID NO: 740 - DNA, 16 bp, synthetic construct
  source 1..16: mol_type = other DNA
cataatccccttaaca

SEQ ID NO: 741 - DNA, 16 bp, synthetic construct
  source 1..16: mol_type = other DNA
ttaaccatcaaggaca

SEQ ID NO: 742 - DNA, 16 bp, synthetic construct
  source 1..16: mol_type = other DNA
tcttagtggctgggta

SEQ ID NO: 743 - DNA, 16 bp, synthetic construct
  source 1..16: mol_type = other DNA
cctaacaaactttgca

SEQ ID NO: 744 - DNA, 16 bp, synthetic construct
  source 1..16: mol_type = other DNA
actaagtgttagaact

SEQ ID NO: 745 - DNA, 16 bp, synthetic construct
  source 1..16: mol_type = other DNA
ctgcagtatccctagc

SEQ ID NO: 746 - DNA, 16 bp, synthetic construct
  source 1..16: mol_type = other DNA
tcccatcggtcatttc

SEQ ID NO: 747 - DNA, 16 bp, synthetic construct
  source 1..16: mol_type = other DNA
gaaaccactatcatca

SEQ ID NO: 748 - DNA, 16 bp, synthetic construct
  source 1..16: mol_type = other DNA
gtaataggccaagtcc

SEQ ID NO: 749 - DNA, 16 bp, synthetic construct
  source 1..16: mol_type = other DNA
caaactaatgcacctg

SEQ ID NO: 750 - DNA, 16 bp, synthetic construct
  source 1..16: mol_type = other DNA
ccaatatcatagctga

SEQ ID NO: 751 - DNA, 16 bp, synthetic construct
  source 1..16: mol_type = other DNA
cacaagagactggacc

SEQ ID NO: 752 - DNA, 16 bp, synthetic construct
  source 1..16: mol_type = other DNA
tactatgggatgagta

SEQ ID NO: 753 - DNA, 16 bp, synthetic construct
  source 1..16: mol_type = other DNA
ttttaatcaagtgccc

SEQ ID NO: 754 - DNA, 16 bp, synthetic construct
  source 1..16: mol_type = other DNA
ggcaggatgtagctgt

SEQ ID NO: 755 - DNA, 16 bp, synthetic construct
  source 1..16: mol_type = other DNA
agtcaaacatcttcct

SEQ ID NO: 756 - DNA, 16 bp, synthetic construct
  source 1..16: mol_type = other DNA
cagactaacttactaa

SEQ ID NO: 757 - DNA, 16 bp, synthetic construct
  source 1..16: mol_type = other DNA
agcttacaacactacc

SEQ ID NO: 758 - DNA, 16 bp, synthetic construct
  source 1..16: mol_type = other DNA
atgctacgggctctca

SEQ ID NO: 759 - DNA, 16 bp, synthetic construct
  source 1..16: mol_type = other DNA
cagggcattcccagcg

SEQ ID NO: 760 - DNA, 16 bp, synthetic construct
  source 1..16: mol_type = other DNA
cagctccgcccggcgc

SEQ ID NO: 761 - DNA, 16 bp, synthetic construct
  source 1..16: mol_type = other DNA
ttaggatctgggtcgg

SEQ ID NO: 762 - DNA, 16 bp, synthetic construct
  source 1..16: mol_type = other DNA
agcccgcgaaggacaa

SEQ ID NO: 763 - DNA, 16 bp, synthetic construct
  source 1..16: mol_type = other DNA
gcgccgaacaacatgc

SEQ ID NO: 764 - DNA, 16 bp, synthetic construct
  source 1..16: mol_type = other DNA
agaggacctgcagagt

SEQ ID NO: 765 - DNA, 16 bp, synthetic construct
  source 1..16: mol_type = other DNA
ccgactcctggccttc

SEQ ID NO: 766 - DNA, 16 bp, synthetic construct
  source 1..16: mol_type = other DNA
aacttgcttaagttga

SEQ ID NO: 767 - DNA, 16 bp, synthetic construct
  source 1..16: mol_type = other DNA
cgggaggcatttgcag

SEQ ID NO: 768 - DNA, 16 bp, synthetic construct
  source 1..16: mol_type = other DNA
tttgccggagatgagc

SEQ ID NO: 769 - DNA, 16 bp, synthetic construct
  source 1..16: mol_type = other DNA
ctctggtaagagagat

SEQ ID NO: 770 - DNA, 16 bp, synthetic construct
  source 1..16: mol_type = other DNA
gtctttggaccgaaag

SEQ ID NO: 771 - DNA, 16 bp, synthetic construct
  source 1..16: mol_type = other DNA
gagggataaggccact

SEQ ID NO: 772 - DNA, 16 bp, synthetic construct
  source 1..16: mol_type = other DNA
gtgatggttgttttgg

SEQ ID NO: 773 - DNA, 16 bp, synthetic construct
  source 1..16: mol_type = other DNA
ggtgatgtccacatga

SEQ ID NO: 774 - DNA, 16 bp, synthetic construct
  source 1..16: mol_type = other DNA
aagctctcgagagaag

SEQ ID NO: 775 - DNA, 16 bp, synthetic construct
  source 1..16: mol_type = other DNA
caaatatcctcgaagg

SEQ ID NO: 776 - DNA, 16 bp, synthetic construct
  source 1..16: mol_type = other DNA
ggatccatcccttctg

SEQ ID NO: 777 - DNA, 16 bp, synthetic construct
  source 1..16: mol_type = other DNA
ctcatgtttgcccagc

SEQ ID NO: 778 - DNA, 16 bp, synthetic construct
  source 1..16: mol_type = other DNA
agacgcaggtggtcta

SEQ ID NO: 779 - DNA, 16 bp, synthetic construct
  source 1..16: mol_type = other DNA
tgctgtagcgagcctg

SEQ ID NO: 780 - DNA, 16 bp, synthetic construct
  source 1..16: mol_type = other DNA
atgggtagcaagttgc

SEQ ID NO: 781 - DNA, 16 bp, synthetic construct
  source 1..16: mol_type = other DNA
ttccacaggcagggta

SEQ ID NO: 782 - DNA, 16 bp, synthetic construct
  source 1..16: mol_type = other DNA
actgcaaccacaggac

SEQ ID NO: 783 - DNA, 16 bp, synthetic construct
  source 1..16: mol_type = other DNA
acatcagcactcgagt

SEQ ID NO: 784 - DNA, 16 bp, synthetic construct
  source 1..16: mol_type = other DNA
ctgctcaggtgtgcat

SEQ ID NO: 785 - DNA, 16 bp, synthetic construct
  source 1..16: mol_type = other DNA
acctgaggatggaccg

SEQ ID NO: 786 - DNA, 16 bp, synthetic construct
  source 1..16: mol_type = other DNA
cagcaccagcaggtac

SEQ ID NO: 787 - DNA, 16 bp, synthetic construct
  source 1..16: mol_type = other DNA
ctcctcaagtgactca

SEQ ID NO: 788 - DNA, 16 bp, synthetic construct
  source 1..16: mol_type = other DNA
tagcacctctgaaaga

SEQ ID NO: 789 - DNA, 16 bp, synthetic construct
  source 1..16: mol_type = other DNA
cactacacagcaatgc

SEQ ID NO: 790 - DNA, 16 bp, synthetic construct
  source 1..16: mol_type = other DNA
cacaggcgaaaggttg

SEQ ID NO: 791 - DNA, 16 bp, synthetic construct
  source 1..16: mol_type = other DNA
agagttaagtgctgga

SEQ ID NO: 792 - DNA, 16 bp, synthetic construct
  source 1..16: mol_type = other DNA
agctgaattaacgcat

SEQ ID NO: 793 - DNA, 16 bp, synthetic construct
  source 1..16: mol_type = other DNA
aagggaccctctgcac

SEQ ID NO: 794 - DNA, 16 bp, synthetic construct
  source 1..16: mol_type = other DNA
taatagggccacgaaa

SEQ ID NO: 795 - DNA, 16 bp, synthetic construct
  source 1..16: mol_type = other DNA
aagaacctcatgctgg

SEQ ID NO: 796 - DNA, 16 bp, synthetic construct
  source 1..16: mol_type = other DNA
cccccatcacaaggcc

SEQ ID NO: 797 - DNA, 16 bp, synthetic construct
  source 1..16: mol_type = other DNA
gatcacacatgggcca

SEQ ID NO: 798 - DNA, 16 bp, synthetic construct
  source 1..16: mol_type = other DNA
acctgacaggcagtgt

SEQ ID NO: 799 - DNA, 16 bp, synthetic construct
  source 1..16: mol_type = other DNA
gtagtcaaggttatca

SEQ ID NO: 800 - DNA, 16 bp, synthetic construct
  source 1..16: mol_type = other DNA
taagtagattatcatc

SEQ ID NO: 801 - DNA, 16 bp, synthetic construct
  source 1..16: mol_type = other DNA
aggcttattctactaa

SEQ ID NO: 802 - DNA, 16 bp, synthetic construct
  source 1..16: mol_type = other DNA
gtgaatgccctgcaca

SEQ ID NO: 803 - DNA, 16 bp, synthetic construct
  source 1..16: mol_type = other DNA
gtgctccagtggagag

SEQ ID NO: 804 - DNA, 16 bp, synthetic construct
  source 1..16: mol_type = other DNA
ggtccctgcagaaaat

SEQ ID NO: 805 - DNA, 16 bp, synthetic construct
  source 1..16: mol_type = other DNA
aagcataccacacccc

SEQ ID NO: 806 - DNA, 16 bp, synthetic construct
  source 1..16: mol_type = other DNA
aatcttgggatgcaca

SEQ ID NO: 807 - DNA, 16 bp, synthetic construct
  source 1..16: mol_type = other DNA
catcatggcttccagt

SEQ ID NO: 808 - DNA, 16 bp, synthetic construct
  source 1..16: mol_type = other DNA
tgggatggtaatactt

SEQ ID NO: 809 - DNA, 16 bp, synthetic construct
  source 1..16: mol_type = other DNA
aagtaaatggagtcct

SEQ ID NO: 810 - DNA, 16 bp, synthetic construct
  source 1..16: mol_type = other DNA
ttgcataatcccctta

SEQ ID NO: 811 - DNA, 16 bp, synthetic construct
  source 1..16: mol_type = other DNA
ttaactagatcactga

SEQ ID NO: 812 - DNA, 16 bp, synthetic construct
  source 1..16: mol_type = other DNA
tcctaatgcgagtccc

SEQ ID NO: 813 - DNA, 16 bp, synthetic construct
  source 1..16: mol_type = other DNA
tgctgctgggtgcact

SEQ ID NO: 814 - DNA, 16 bp, synthetic construct
  source 1..16: mol_type = other DNA
ggtgatgacacagcat

SEQ ID NO: 815 - DNA, 16 bp, synthetic construct
  source 1..16: mol_type = other DNA
gccatgtacaactttt

SEQ ID NO: 816 - DNA, 16 bp, synthetic construct
  source 1..16: mol_type = other DNA
tacaatttggacagag

SEQ ID NO: 817 - DNA, 16 bp, synthetic construct
  source 1..16: mol_type = other DNA
acctataggagtgccc

SEQ ID NO: 818 - DNA, 16 bp, synthetic construct
  source 1..16: mol_type = other DNA
ttatttccgttaacca

SEQ ID NO: 819 - DNA, 16 bp, synthetic construct
  source 1..16: mol_type = other DNA
agaatcatcttagtgg

SEQ ID NO: 820 - DNA, 16 bp, synthetic construct
  source 1..16: mol_type = other DNA
cggaataagcctccac

SEQ ID NO: 821 - DNA, 16 bp, synthetic construct
  source 1..16: mol_type = other DNA
ggcactaagtgttaga

SEQ ID NO: 822 - DNA, 16 bp, synthetic construct
  source 1..16: mol_type = other DNA
tctcacaaggctggca

SEQ ID NO: 823 - DNA, 16 bp, synthetic construct
  source 1..16: mol_type = other DNA
gccataccggctccct

SEQ ID NO: 824 - DNA, 16 bp, synthetic construct
  source 1..16: mol_type = other DNA
ggccttacagaaacca

SEQ ID NO: 825 - DNA, 16 bp, synthetic construct
  source 1..16: mol_type = other DNA
agtaataggccaagtc

SEQ ID NO: 826 - DNA, 16 bp, synthetic construct
  source 1..16: mol_type = other DNA
acaaactaatgcacct

SEQ ID NO: 827 - DNA, 16 bp, synthetic construct
  source 1..16: mol_type = other DNA
tccaatatcatagctg

SEQ ID NO: 828 - DNA, 16 bp, synthetic construct
  source 1..16: mol_type = other DNA
ctactaggcatctcta

SEQ ID NO: 829 - DNA, 16 bp, synthetic construct
  source 1..16: mol_type = other DNA
cttactatgggatgag

SEQ ID NO: 830 - DNA, 16 bp, synthetic construct
  source 1..16: mol_type = other DNA
taatattcagaccagg

SEQ ID NO: 831 - DNA, 16 bp, synthetic construct
  source 1..16: mol_type = other DNA
ccatgcatggcacagt

SEQ ID NO: 832 - DNA, 16 bp, synthetic construct
  source 1..16: mol_type = other DNA
agacaggaatccaacc

SEQ ID NO: 833 - DNA, 16 bp, synthetic construct
  source 1..16: mol_type = other DNA
ggacatgacagactaa

SEQ ID NO: 834 - DNA, 16 bp, synthetic construct
  source 1..16: mol_type = other DNA
gcagacacaacagctt

SEQ ID NO: 835 - DNA, 16 bp, synthetic construct
  source 1..16: mol_type = other DNA
ccatgctacgggctct

SEQ ID NO: 836 - DNA, 16 bp, synthetic construct
  source 1..16: mol_type = other DNA
ggccagggcattccca

SEQ ID NO: 837 - DNA, 16 bp, synthetic construct
  source 1..16: mol_type = other DNA
gcagctccgcccggcg

SEQ ID NO: 838 - DNA, 16 bp, synthetic construct
  source 1..16: mol_type = other DNA
ggttaggatctgggtc

SEQ ID NO: 839 - DNA, 16 bp, synthetic construct
  source 1..16: mol_type = other DNA
ggtagaagcccaggaa

SEQ ID NO: 840 - DNA, 16 bp, synthetic construct
  source 1..16: mol_type = other DNA
cgacgcagtgcaacgc

SEQ ID NO: 841 - DNA, 16 bp, synthetic construct
  source 1..16: mol_type = other DNA
tgagaggacctgcaga

SEQ ID NO: 842 - DNA, 16 bp, synthetic construct
  source 1..16: mol_type = other DNA
atgttccgactcctgg

SEQ ID NO: 843 - DNA, 16 bp, synthetic construct
  source 1..16: mol_type = other DNA
gaacttgcttaagttg

SEQ ID NO: 844 - DNA, 16 bp, synthetic construct
  source 1..16: mol_type = other DNA
ccgggaggcatttgca

SEQ ID NO: 845 - DNA, 16 bp, synthetic construct
  source 1..16: mol_type = other DNA
ttttgccggagatgag

SEQ ID NO: 846 - DNA, 16 bp, synthetic construct
  source 1..16: mol_type = other DNA
actctggtaagagaga

SEQ ID NO: 847 - DNA, 16 bp, synthetic construct
  source 1..16: mol_type = other DNA
cgtctttggaccgaaa

SEQ ID NO: 848 - DNA, 16 bp, synthetic construct
  source 1..16: mol_type = other DNA
cggtgatggttgtttt

SEQ ID NO: 849 - DNA, 16 bp, synthetic construct
  source 1..16: mol_type = other DNA
tggtgatgtccacatg

SEQ ID NO: 850 - DNA, 16 bp, synthetic construct
  source 1..16: mol_type = other DNA
aaagctctcgagagaa

SEQ ID NO: 851 - DNA, 16 bp, synthetic construct
  source 1..16: mol_type = other DNA
atccaaatatcctcga

SEQ ID NO: 852 - DNA, 16 bp, synthetic construct
  source 1..16: mol_type = other DNA
aggatccatcccttct

SEQ ID NO: 853 - DNA, 16 bp, synthetic construct
  source 1..16: mol_type = other DNA
gactcatgtttgccca

SEQ ID NO: 854 - DNA, 16 bp, synthetic construct
  source 1..16: mol_type = other DNA
gagacgcaggtggtct

SEQ ID NO: 855 - DNA, 16 bp, synthetic construct
  source 1..16: mol_type = other DNA
gtgctgtagcgagcct

SEQ ID NO: 856 - DNA, 16 bp, synthetic construct
  source 1..16: mol_type = other DNA
aatgggtagcaagttg

SEQ ID NO: 857 - DNA, 16 bp, synthetic construct
  source 1..16: mol_type = other DNA
attccacaggcagggt

SEQ ID NO: 858 - DNA, 16 bp, synthetic construct
  source 1..16: mol_type = other DNA
gtcacccactgcaacc

SEQ ID NO: 859 - DNA, 16 bp, synthetic construct
  source 1..16: mol_type = other DNA
cacatcagcactcgag

SEQ ID NO: 860 - DNA, 16 bp, synthetic construct
  source 1..16: mol_type = other DNA
tcctgctcaggtgtgc

SEQ ID NO: 861 - DNA, 16 bp, synthetic construct
  source 1..16: mol_type = other DNA
gacctgaggatggacc

SEQ ID NO: 862 - DNA, 16 bp, synthetic construct
  source 1..16: mol_type = other DNA
tcagcaccagcaggta

SEQ ID NO: 863 - DNA, 16 bp, synthetic construct
  source 1..16: mol_type = other DNA
cgcctcctcaagtgac

SEQ ID NO: 864 - DNA, 16 bp, synthetic construct
  source 1..16: mol_type = other DNA
actttagcacctctga

SEQ ID NO: 865 - DNA, 16 bp, synthetic construct
  source 1..16: mol_type = other DNA
gtcactacacagcaat

SEQ ID NO: 866 - DNA, 16 bp, synthetic construct
  source 1..16: mol_type = other DNA
gcacaggcgaaaggtt

SEQ ID NO: 867 - DNA, 16 bp, synthetic construct
  source 1..16: mol_type = other DNA
tagagttaagtgctgg

SEQ ID NO: 868 - DNA, 16 bp, synthetic construct
  source 1..16: mol_type = other DNA
cagctgaattaacgca

SEQ ID NO: 869 - DNA, 16 bp, synthetic construct
  source 1..16: mol_type = other DNA
taagggaccctctgca

SEQ ID NO: 870 - DNA, 16 bp, synthetic construct
  source 1..16: mol_type = other DNA
ttaatagggccacgaa

SEQ ID NO: 871 - DNA, 16 bp, synthetic construct
  source 1..16: mol_type = other DNA
taagaacctcatgctg

SEQ ID NO: 872 - DNA, 16 bp, synthetic construct
  source 1..16: mol_type = other DNA
ccccccatcacaaggc

SEQ ID NO: 873 - DNA, 16 bp, synthetic construct
  source 1..16: mol_type = other DNA
agatcacacatgggcc

SEQ ID NO: 874 - DNA, 16 bp, synthetic construct
  source 1..16: mol_type = other DNA
accacctgacaggcag

SEQ ID NO: 875 - DNA, 16 bp, synthetic construct
  source 1..16: mol_type = other DNA
agtagtcaaggttatc

SEQ ID NO: 876 - DNA, 16 bp, synthetic construct
  source 1..16: mol_type = other DNA
tgaaaaaggtgttcta

SEQ ID NO: 877 - DNA, 16 bp, synthetic construct
  source 1..16: mol_type = other DNA
aaggcttattctacta

SEQ ID NO: 878 - DNA, 16 bp, synthetic construct
  source 1..16: mol_type = other DNA
aggtgaatgccctgca

SEQ ID NO: 879 - DNA, 16 bp, synthetic construct
  source 1..16: mol_type = other DNA
tgtgctccagtggaga

SEQ ID NO: 880 - DNA, 16 bp, synthetic construct
  source 1..16: mol_type = other DNA
tggtccctgcagaaaa

SEQ ID NO: 881 - DNA, 16 bp, synthetic construct
  source 1..16: mol_type = other DNA
tgcctactggctcaca

SEQ ID NO: 882 - DNA, 16 bp, synthetic construct
  source 1..16: mol_type = other DNA
aaatcttgggatgcac

SEQ ID NO: 883 - DNA, 16 bp, synthetic construct
  source 1..16: mol_type = other DNA
tgacatcatggcttcc

SEQ ID NO: 884 - DNA, 16 bp, synthetic construct
  source 1..16: mol_type = other DNA
gcttacatccacgact

SEQ ID NO: 885 - DNA, 16 bp, synthetic construct
  source 1..16: mol_type = other DNA
caagtaaatggagtcc

SEQ ID NO: 886 - DNA, 16 bp, synthetic construct
  source 1..16: mol_type = other DNA
atctattgcataatcc

SEQ ID NO: 887 - DNA, 16 bp, synthetic construct
  source 1..16: mol_type = other DNA
tttatttccgttaacc

SEQ ID NO: 888 - DNA, 16 bp, synthetic construct
  source 1..16: mol_type = other DNA
ttcttgaccgtgtttc

SEQ ID NO: 889 - DNA, 16 bp, synthetic construct
  source 1..16: mol_type = other DNA
ccggaataagcctcca

SEQ ID NO: 890 - DNA, 16 bp, synthetic construct
  source 1..16: mol_type = other DNA
tgtacaatgggacgga

SEQ ID NO: 891 - DNA, 16 bp, synthetic construct
  source 1..16: mol_type = other DNA
atcgacacagcatcac

SEQ ID NO: 892 - DNA, 16 bp, synthetic construct
  source 1..16: mol_type = other DNA
tgccataccggctccc

SEQ ID NO: 893 - DNA, 16 bp, synthetic construct
  source 1..16: mol_type = other DNA
ggtttataacaactga

SEQ ID NO: 894 - DNA, 16 bp, synthetic construct
  source 1..16: mol_type = other DNA
gccttgaggtgggtgg

SEQ ID NO: 895 - DNA, 16 bp, synthetic construct
  source 1..16: mol_type = other DNA
agtcatgggatgtgca

SEQ ID NO: 896 - DNA, 16 bp, synthetic construct
  source 1..16: mol_type = other DNA
atgtttggaagtcgcc

SEQ ID NO: 897 - DNA, 16 bp, synthetic construct
  source 1..16: mol_type = other DNA
aaggatcctgcttcta

SEQ ID NO: 898 - DNA, 16 bp, synthetic construct
  source 1..16: mol_type = other DNA
gcttactatgggatga

SEQ ID NO: 899 - DNA, 16 bp, synthetic construct
  source 1..16: mol_type = other DNA
gtaatattcagaccag

SEQ ID NO: 900 - DNA, 16 bp, synthetic construct
  source 1..16: mol_type = other DNA
atccatgcatggcaca

SEQ ID NO: 901 - DNA, 16 bp, synthetic construct
  source 1..16: mol_type = other DNA
gtcagacacggagaca

SEQ ID NO: 902 - DNA, 16 bp, synthetic construct
  source 1..16: mol_type = other DNA
ggcttttgaaggagag

SEQ ID NO: 903 - DNA, 16 bp, synthetic construct
  source 1..16: mol_type = other DNA
tatttacctggaggcg

SEQ ID NO: 904 - DNA, 16 bp, synthetic construct
  source 1..16: mol_type = other DNA
caaatcggatctttgc

SEQ ID NO: 905 - DNA, 16 bp, synthetic construct
  source 1..16: mol_type = other DNA
cggccagggcattccc

SEQ ID NO: 906 - DNA, 16 bp, synthetic construct
  source 1..16: mol_type = other DNA
gcagcagctccgcccg

SEQ ID NO: 907 - DNA, 16 bp, synthetic construct
  source 1..16: mol_type = other DNA
gcgggttaggatctgg

SEQ ID NO: 908 - DNA, 16 bp, synthetic construct
  source 1..16: mol_type = other DNA
cgtggtagaagcccag

SEQ ID NO: 909 - DNA, 16 bp, synthetic construct
  source 1..16: mol_type = other DNA
ccgacgcagtgcaacg

SEQ ID NO: 910 - DNA, 16 bp, synthetic construct
  source 1..16: mol_type = other DNA
atctgagaggacctgc

SEQ ID NO: 911 - DNA, 16 bp, synthetic construct
  source 1..16: mol_type = other DNA
aatgttccgactcctg

SEQ ID NO: 912 - DNA, 16 bp, synthetic construct
  source 1..16: mol_type = other DNA
ggaacttgcttaagtt

SEQ ID NO: 913 - DNA, 16 bp, synthetic construct
  source 1..16: mol_type = other DNA
gccgggaggcatttgc

SEQ ID NO: 914 - DNA, 16 bp, synthetic construct
  source 1..16: mol_type = other DNA
attttgccggagatga

SEQ ID NO: 915 - DNA, 16 bp, synthetic construct
  source 1..16: mol_type = other DNA
cactctggtaagagag

SEQ ID NO: 916 - DNA, 16 bp, synthetic construct
  source 1..16: mol_type = other DNA
acggtgatggttgttt

SEQ ID NO: 917 - DNA, 16 bp, synthetic construct
  source 1..16: mol_type = other DNA
agcttggtgatgtcca

SEQ ID NO: 918 - DNA, 16 bp, synthetic construct
  source 1..16: mol_type = other DNA
aaaagctctcgagaga

SEQ ID NO: 919 - DNA, 16 bp, synthetic construct
  source 1..16: mol_type = other DNA
catccaaatatcctcg

SEQ ID NO: 920 - DNA, 16 bp, synthetic construct
  source 1..16: mol_type = other DNA
caggatccatcccttc

SEQ ID NO: 921 - DNA, 16 bp, synthetic construct
  source 1..16: mol_type = other DNA
agactcatgtttgccc

SEQ ID NO: 922 - DNA, 16 bp, synthetic construct
  source 1..16: mol_type = other DNA
ctgagacgcaggtggt

SEQ ID NO: 923 - DNA, 16 bp, synthetic construct
  source 1..16: mol_type = other DNA
agtgctgtagcgagcc

SEQ ID NO: 924 - DNA, 16 bp, synthetic construct
  source 1..16: mol_type = other DNA
taatgggtagcaagtt

SEQ ID NO: 925 - DNA, 16 bp, synthetic construct
  source 1..16: mol_type = other DNA
caatggcagattccac

SEQ ID NO: 926 - DNA, 16 bp, synthetic construct
  source 1..16: mol_type = other DNA
ggtcacccactgcaac

SEQ ID NO: 927 - DNA, 16 bp, synthetic construct
  source 1..16: mol_type = other DNA
acacatcagcactcga

SEQ ID NO: 928 - DNA, 16 bp, synthetic construct
  source 1..16: mol_type = other DNA
gtcctgctcaggtgtg

SEQ ID NO: 929 - DNA, 16 bp, synthetic construct
  source 1..16: mol_type = other DNA
ggctggacctgaggat

SEQ ID NO: 930 - DNA, 16 bp, synthetic construct
  source 1..16: mol_type = other DNA
gtggagagcccctcag

SEQ ID NO: 931 - DNA, 16 bp, synthetic construct
  source 1..16: mol_type = other DNA
tcgcctcctcaagtga

SEQ ID NO: 932 - DNA, 16 bp, synthetic construct
  source 1..16: mol_type = other DNA
aaactttagcacctct

SEQ ID NO: 933 - DNA, 16 bp, synthetic construct
  source 1..16: mol_type = other DNA
ggtcactacacagcaa

SEQ ID NO: 934 - DNA, 16 bp, synthetic construct
  source 1..16: mol_type = other DNA
tgcacaggcgaaaggt

SEQ ID NO: 935 - DNA, 16 bp, synthetic construct
  source 1..16: mol_type = other DNA
ttagagttaagtgctg

SEQ ID NO: 936 - DNA, 16 bp, synthetic construct
  source 1..16: mol_type = other DNA
ccagctgaattaacgc

SEQ ID NO: 937 - DNA, 16 bp, synthetic construct
  source 1..16: mol_type = other DNA
gtaagggaccctctgc

SEQ ID NO: 938 - DNA, 16 bp, synthetic construct
  source 1..16: mol_type = other DNA
cattaatagggccacg

SEQ ID NO: 939 - DNA, 16 bp, synthetic construct
  source 1..16: mol_type = other DNA
ctaagaacctcatgct

SEQ ID NO: 940 - DNA, 16 bp, synthetic construct
  source 1..16: mol_type = other DNA
accccccatcacaagg

SEQ ID NO: 941 - DNA, 16 bp, synthetic construct
  source 1..16: mol_type = other DNA
aagatcacacatgggc

SEQ ID NO: 942 - DNA, 16 bp, synthetic construct
  source 1..16: mol_type = other DNA
gaccacctgacaggca

SEQ ID NO: 943 - DNA, 16 bp, synthetic construct
  source 1..16: mol_type = other DNA
tagtagtcaaggttat

SEQ ID NO: 944 - DNA, 16 bp, synthetic construct
  source 1..16: mol_type = other DNA
ggtgaaaaaggtgttc

SEQ ID NO: 945 - DNA, 16 bp, synthetic construct
  source 1..16: mol_type = other DNA
taaggcttattctact

SEQ ID NO: 946 - DNA, 16 bp, synthetic construct
  source 1..16: mol_type = other DNA
gaggtgaatgccctgc

SEQ ID NO: 947 - DNA, 16 bp, synthetic construct
  source 1..16: mol_type = other DNA
gtgtgctccagtggag

SEQ ID NO: 948 - DNA, 16 bp, synthetic construct
  source 1..16: mol_type = other DNA
ctggtccctgcagaaa

SEQ ID NO: 949 - DNA, 16 bp, synthetic construct
  source 1..16: mol_type = other DNA
caatgctacttgcccc

SEQ ID NO: 950 - DNA, 16 bp, synthetic construct
  source 1..16: mol_type = other DNA
taaatcttgggatgca

SEQ ID NO: 951 - DNA, 16 bp, synthetic construct
  source 1..16: mol_type = other DNA
acaatgacatcatggc

SEQ ID NO: 952 - DNA, 16 bp, synthetic construct
  source 1..16: mol_type = other DNA
gcaaactgcttacatc

SEQ ID NO: 953 - DNA, 16 bp, synthetic construct
  source 1..16: mol_type = other DNA
gttagacgcgccaggc

SEQ ID NO: 954 - DNA, 16 bp, synthetic construct
  source 1..16: mol_type = other DNA
tctcatctattgcata

SEQ ID NO: 955 - DNA, 16 bp, synthetic construct
  source 1..16: mol_type = other DNA
ttttatttccgttaac

SEQ ID NO: 956 - DNA, 16 bp, synthetic construct
  source 1..16: mol_type = other DNA
taaactaccgaacgca

SEQ ID NO: 957 - DNA, 16 bp, synthetic construct
  source 1..16: mol_type = other DNA
cccggaataagcctcc

SEQ ID NO: 958 - DNA, 16 bp, synthetic construct
  source 1..16: mol_type = other DNA
ctgtacaatgggacgg

SEQ ID NO: 959 - DNA, 16 bp, synthetic construct
  source 1..16: mol_type = other DNA
tcccatcgacacagca

SEQ ID NO: 960 - DNA, 16 bp, synthetic construct
  source 1..16: mol_type = other DNA
ggaatattgccaggta

SEQ ID NO: 961 - DNA, 16 bp, synthetic construct
  source 1..16: mol_type = other DNA
tggtttataacaactg

SEQ ID NO: 962 - DNA, 16 bp, synthetic construct
  source 1..16: mol_type = other DNA
attaggagaggtctca

SEQ ID NO: 963 - DNA, 16 bp, synthetic construct
  source 1..16: mol_type = other DNA
cttgatagtgaatgtg

SEQ ID NO: 964 - DNA, 16 bp, synthetic construct
  source 1..16: mol_type = other DNA
ggcactcacaaaagcg

SEQ ID NO: 965 - DNA, 16 bp, synthetic construct
  source 1..16: mol_type = other DNA
ccctatgttctacttt

SEQ ID NO: 966 - DNA, 16 bp, synthetic construct
  source 1..16: mol_type = other DNA
caacatctctagctgg

SEQ ID NO: 967 - DNA, 16 bp, synthetic construct
  source 1..16: mol_type = other DNA
ggtaatattcagacca

SEQ ID NO: 968 - DNA, 16 bp, synthetic construct
  source 1..16: mol_type = other DNA
tgaagctacagatcca

SEQ ID NO: 969 - DNA, 16 bp, synthetic construct
  source 1..16: mol_type = other DNA
ggaaatctgtcagagc

SEQ ID NO: 970 - DNA, 16 bp, synthetic construct
  source 1..16: mol_type = other DNA
gaatctaggaaggcga

SEQ ID NO: 971 - DNA, 16 bp, synthetic construct
  source 1..16: mol_type = other DNA
agtatttacctggagg

SEQ ID NO: 972 - DNA, 16 bp, synthetic construct
  source 1..16: mol_type = other DNA
agccttaggaagcctc

SEQ ID NO: 973 - DNA, 16 bp, synthetic construct
  source 1..16: mol_type = other DNA
tcggccagggcattcc

SEQ ID NO: 974 - DNA, 16 bp, synthetic construct
  source 1..16: mol_type = other DNA
cgcagcagctccgccc

SEQ ID NO: 975 - DNA, 16 bp, synthetic construct
  source 1..16: mol_type = other DNA
cgcgggttaggatctg

SEQ ID NO: 976 - DNA, 16 bp, synthetic construct
  source 1..16: mol_type = other DNA
gcgggtcgccccgacg

SEQ ID NO: 977 - DNA, 16 bp, synthetic construct
  source 1..16: mol_type = other DNA
acgccgacgcagtgca

SEQ ID NO: 978 - DNA, 16 bp, synthetic construct
  source 1..16: mol_type = other DNA
gatctgagaggacctg

SEQ ID NO: 979 - DNA, 16 bp, synthetic construct
  source 1..16: mol_type = other DNA
caatgttccgactcct

SEQ ID NO: 980 - DNA, 16 bp, synthetic construct
  source 1..16: mol_type = other DNA
ggaggaacttgcttaa

SEQ ID NO: 981 - DNA, 16 bp, synthetic construct
  source 1..16: mol_type = other DNA
ggccgggaggcatttg

SEQ ID NO: 982 - DNA, 16 bp, synthetic construct
  source 1..16: mol_type = other DNA
tattttgccggagatg

SEQ ID NO: 983 - DNA, 16 bp, synthetic construct
  source 1..16: mol_type = other DNA
acactctggtaagaga

SEQ ID NO: 984 - DNA, 16 bp, synthetic construct
  source 1..16: mol_type = other DNA
cacggtgatggttgtt

SEQ ID NO: 985 - DNA, 16 bp, synthetic construct
  source 1..16: mol_type = other DNA
gagcttggtgatgtcc

SEQ ID NO: 986 - DNA, 16 bp, synthetic construct
  source 1..16: mol_type = other DNA
caaaagctctcgagag

SEQ ID NO: 987 - DNA, 16 bp, synthetic construct
  source 1..16: mol_type = other DNA
gcatccaaatatcctc

SEQ ID NO: 988 - DNA, 16 bp, synthetic construct
  source 1..16: mol_type = other DNA
tcaggatccatccctt

SEQ ID NO: 989 - DNA, 16 bp, synthetic construct
  source 1..16: mol_type = other DNA
cagactcatgtttgcc

SEQ ID NO: 990 - DNA, 16 bp, synthetic construct
  source 1..16: mol_type = other DNA
gctgagacgcaggtgg

SEQ ID NO: 991 - DNA, 16 bp, synthetic construct
  source 1..16: mol_type = other DNA
cagtgctgtagcgagc

SEQ ID NO: 992 - DNA, 16 bp, synthetic construct
  source 1..16: mol_type = other DNA
ctaatgggtagcaagt

SEQ ID NO: 993 - DNA, 16 bp, synthetic construct
  source 1..16: mol_type = other DNA
gcaatggcagattcca

SEQ ID NO: 994 - DNA, 16 bp, synthetic construct
  source 1..16: mol_type = other DNA
aggtcacccactgcaa

SEQ ID NO: 995 - DNA, 16 bp, synthetic construct
  source 1..16: mol_type = other DNA
gacacatcagcactcg

SEQ ID NO: 996 - DNA, 16 bp, synthetic construct
  source 1..16: mol_type = other DNA
agtcctgctcaggtgt

SEQ ID NO: 997 - DNA, 16 bp, synthetic construct
  source 1..16: mol_type = other DNA
aagttcaggctggacc

SEQ ID NO: 998 - DNA, 16 bp, synthetic construct
  source 1..16: mol_type = other DNA
ggtggagagcccctca

SEQ ID NO: 999 - DNA, 16 bp, synthetic construct
  source 1..16: mol_type = other DNA
ctcgcctcctcaagtg

SEQ ID NO: 1000 - DNA, 16 bp, synthetic construct
  source 1..16: mol_type = other DNA
gatgggaaactttagc

SEQ ID NO: 1001 - DNA, 16 bp, synthetic construct
  source 1..16: mol_type = other DNA
gggtcactacacagca

SEQ ID NO: 1002 - DNA, 16 bp, synthetic construct
  source 1..16: mol_type = other DNA
ctgcacaggcgaaagg

SEQ ID NO: 1003 - DNA, 16 bp, synthetic construct
  source 1..16: mol_type = other DNA
attagagttaagtgct

SEQ ID NO: 1004 - DNA, 16 bp, synthetic construct
  source 1..16: mol_type = other DNA
accagctgaattaacg

SEQ ID NO: 1005 - DNA, 16 bp, synthetic construct
  source 1..16: mol_type = other DNA
gtcagtaagggaccct

SEQ ID NO: 1006 - DNA, 16 bp, synthetic construct
  source 1..16: mol_type = other DNA
gaccattaatagggcc

SEQ ID NO: 1007 - DNA, 16 bp, synthetic construct
  source 1..16: mol_type = other DNA
tctaagaacctcatgc

SEQ ID NO: 1008 - DNA, 16 bp, synthetic construct
  source 1..16: mol_type = other DNA
taccccccatcacaag

SEQ ID NO: 1009 - DNA, 16 bp, synthetic construct
  source 1..16: mol_type = other DNA
acaagatcacacatgg

SEQ ID NO: 1010 - DNA, 16 bp, synthetic construct
  source 1..16: mol_type = other DNA
agaccacctgacaggc

SEQ ID NO: 1011 - DNA, 16 bp, synthetic construct
  source 1..16: mol_type = other DNA
ttagtagtcaaggtta

SEQ ID NO: 1012 - DNA, 16 bp, synthetic construct
  source 1..16: mol_type = other DNA
aggtgaaaaaggtgtt

SEQ ID NO: 1013 - DNA, 16 bp, synthetic construct
  source 1..16: mol_type = other DNA
ttaaggcttattctac

SEQ ID NO: 1014 - DNA, 16 bp, synthetic construct
  source 1..16: mol_type = other DNA
tgaggtgaatgccctg

SEQ ID NO: 1015 - DNA, 16 bp, synthetic construct
  source 1..16: mol_type = other DNA
tgtgtgctccagtgga

SEQ ID NO: 1016 - DNA, 16 bp, synthetic construct
  source 1..16: mol_type = other DNA
gctggtccctgcagaa

SEQ ID NO: 1017 - DNA, 16 bp, synthetic construct
  source 1..16: mol_type = other DNA
gggacgcacgagagtc

SEQ ID NO: 1018 - DNA, 16 bp, synthetic construct
  source 1..16: mol_type = other DNA
gtcaatagcttcacaa

SEQ ID NO: 1019 - DNA, 16 bp, synthetic construct
  source 1..16: mol_type = other DNA
ataaatcttgggatgc

SEQ ID NO: 1020 - DNA, 16 bp, synthetic construct
  source 1..16: mol_type = other DNA
cacaatgacatcatgg

SEQ ID NO: 1021 - DNA, 16 bp, synthetic construct
  source 1..16: mol_type = other DNA
gataagcaaactgctt

SEQ ID NO: 1022 - DNA, 16 bp, synthetic construct
  source 1..16: mol_type = other DNA
gaggatgcaactggct

SEQ ID NO: 1023 - DNA, 16 bp, synthetic construct
  source 1..16: mol_type = other DNA
tcggacttcaggccca

SEQ ID NO: 1024 - DNA, 16 bp, synthetic construct
  source 1..16: mol_type = other DNA
ccttttatttccgtta

SEQ ID NO: 1025 - DNA, 16 bp, synthetic construct
  source 1..16: mol_type = other DNA
gcatactaaaaccacc

SEQ ID NO: 1026 - DNA, 16 bp, synthetic construct
  source 1..16: mol_type = other DNA
gactttgcaggcaccc

SEQ ID NO: 1027 - DNA, 16 bp, synthetic construct
  source 1..16: mol_type = other DNA
tgacatcccagttcaa

SEQ ID NO: 1028 - DNA, 16 bp, synthetic construct
  source 1..16: mol_type = other DNA
tactttcccatcgaca

SEQ ID NO: 1029 - DNA, 16 bp, synthetic construct
  source 1..16: mol_type = other DNA
aggaatattgccaggt

SEQ ID NO: 1030 - DNA, 16 bp, synthetic construct
  source 1..16: mol_type = other DNA
ggttagtgttggttta

SEQ ID NO: 1031 - DNA, 16 bp, synthetic construct
  source 1..16: mol_type = other DNA
cattcgatggaggttc

SEQ ID NO: 1032 - DNA, 16 bp, synthetic construct
  source 1..16: mol_type = other DNA
ggcggatttccccact

SEQ ID NO: 1033 - DNA, 16 bp, synthetic construct
  source 1..16: mol_type = other DNA
taaaatacgcccgtcc

SEQ ID NO: 1034 - DNA, 16 bp, synthetic construct
  source 1..16: mol_type = other DNA
tccctatgttctactt

SEQ ID NO: 1035 - DNA, 16 bp, synthetic construct
  source 1..16: mol_type = other DNA
atcaacatctctagct

SEQ ID NO: 1036 - DNA, 16 bp, synthetic construct
  source 1..16: mol_type = other DNA
gggtaatattcagacc

SEQ ID NO: 1037 - DNA, 16 bp, synthetic construct
  source 1..16: mol_type = other DNA
tttactagagactctg

SEQ ID NO: 1038 - DNA, 16 bp, synthetic construct
  source 1..16: mol_type = other DNA
gtaggataggactaga

SEQ ID NO: 1039 - DNA, 16 bp, synthetic construct
  source 1..16: mol_type = other DNA
ataaatgcctgaccac

SEQ ID NO: 1040 - DNA, 16 bp, synthetic construct
  source 1..16: mol_type = other DNA
tgtttctagaatgtcg

SEQ ID NO: 1041 - DNA, 16 bp, synthetic construct
  source 1..16: mol_type = other DNA
gcctatcagtttcccc

SEQ ID NO: 1042 - DNA, 16 bp, synthetic construct
  source 1..16: mol_type = other DNA
ctcggccagggcattc

SEQ ID NO: 1043 - DNA, 16 bp, synthetic construct
  source 1..16: mol_type = other DNA
tccgcagcagctccgc

SEQ ID NO: 1044 - DNA, 16 bp, synthetic construct
  source 1..16: mol_type = other DNA
gcgcgggttaggatct

SEQ ID NO: 1045 - DNA, 16 bp, synthetic construct
  source 1..16: mol_type = other DNA
agcgggtcgccccgac

SEQ ID NO: 1046 - DNA, 16 bp, synthetic construct
  source 1..16: mol_type = other DNA
ataccggagaggacgc

SEQ ID NO: 1047 - DNA, 16 bp, synthetic construct
  source 1..16: mol_type = other DNA
aagatctgagaggacc

SEQ ID NO: 1048 - DNA, 16 bp, synthetic construct
  source 1..16: mol_type = other DNA
ccaatgttccgactcc

SEQ ID NO: 1049 - DNA, 16 bp, synthetic construct
  source 1..16: mol_type = other DNA
cggaggaacttgctta

SEQ ID NO: 1050 - DNA, 16 bp, synthetic construct
  source 1..16: mol_type = other DNA
tggccgggaggcattt

SEQ ID NO: 1051 - DNA, 16 bp, synthetic construct
  source 1..16: mol_type = other DNA
ctattttgccggagat

SEQ ID NO: 1052 - DNA, 16 bp, synthetic construct
  source 1..16: mol_type = other DNA
gacactctggtaagag

SEQ ID NO: 1053 - DNA, 16 bp, synthetic construct
  source 1..16: mol_type = other DNA
acacggtgatggttgt

SEQ ID NO: 1054 - DNA, 16 bp, synthetic construct
  source 1..16: mol_type = other DNA
actgagcttggtgatg

SEQ ID NO: 1055 - DNA, 16 bp, synthetic construct
  source 1..16: mol_type = other DNA
acaaaagctctcgaga

SEQ ID NO: 1056 - DNA, 16 bp, synthetic construct
  source 1..16: mol_type = other DNA
acctgaatgcatccaa

SEQ ID NO: 1057 - DNA, 16 bp, synthetic construct
  source 1..16: mol_type = other DNA
ctcaggatccatccct

SEQ ID NO: 1058 - DNA, 16 bp, synthetic construct
  source 1..16: mol_type = other DNA
ccagactcatgtttgc

SEQ ID NO: 1059 - DNA, 16 bp, synthetic construct
  source 1..16: mol_type = other DNA
tgctgagacgcaggtg

SEQ ID NO: 1060 - DNA, 16 bp, synthetic construct
  source 1..16: mol_type = other DNA
tcagtgctgtagcgag

SEQ ID NO: 1061 - DNA, 16 bp, synthetic construct
  source 1..16: mol_type = other DNA
tatcctaatgggtagc

SEQ ID NO: 1062 - DNA, 16 bp, synthetic construct
  source 1..16: mol_type = other DNA
tcgcaatggcagattc

SEQ ID NO: 1063 - DNA, 16 bp, synthetic construct
  source 1..16: mol_type = other DNA
tgtgaggtcacccact

SEQ ID NO: 1064 - DNA, 16 bp, synthetic construct
  source 1..16: mol_type = other DNA
agacacatcagcactc

SEQ ID NO: 1065 - DNA, 16 bp, synthetic construct
  source 1..16: mol_type = other DNA
cagtcctgctcaggtg

SEQ ID NO: 1066 - DNA, 16 bp, synthetic construct
  source 1..16: mol_type = other DNA
gaagttcaggctggac

SEQ ID NO: 1067 - DNA, 16 bp, synthetic construct
  source 1..16: mol_type = other DNA
aggtggagagcccctc

SEQ ID NO: 1068 - DNA, 16 bp, synthetic construct
  source 1..16: mol_type = other DNA
actcgcctcctcaagt

SEQ ID NO: 1069 - DNA, 16 bp, synthetic construct
  source 1..16: mol_type = other DNA
agatgggaaactttag

SEQ ID NO: 1070 - DNA, 16 bp, synthetic construct
  source 1..16: mol_type = other DNA
ggctgggatcctccac

SEQ ID NO: 1071 - DNA, 16 bp, synthetic construct
  source 1..16: mol_type = other DNA
gctgcacaggcgaaag

SEQ ID NO: 1072 - DNA, 16 bp, synthetic construct
  source 1..16: mol_type = other DNA
tattagagttaagtgc

SEQ ID NO: 1073 - DNA, 16 bp, synthetic construct
  source 1..16: mol_type = other DNA
aaccagctgaattaac

SEQ ID NO: 1074 - DNA, 16 bp, synthetic construct
  source 1..16: mol_type = other DNA
cagtcagtaagggacc

SEQ ID NO: 1075 - DNA, 16 bp, synthetic construct
  source 1..16: mol_type = other DNA
tgaccattaatagggc

SEQ ID NO: 1076 - DNA, 16 bp, synthetic construct
  source 1..16: mol_type = other DNA
ttctaagaacctcatg

SEQ ID NO: 1077 - DNA, 16 bp, synthetic construct
  source 1..16: mol_type = other DNA
ctaccccccatcacaa

SEQ ID NO: 1078 - DNA, 16 bp, synthetic construct
  source 1..16: mol_type = other DNA
ccacaagatcacacat

SEQ ID NO: 1079 - DNA, 16 bp, synthetic construct
  source 1..16: mol_type = other DNA
cagaccacctgacagg

SEQ ID NO: 1080 - DNA, 16 bp, synthetic construct
  source 1..16: mol_type = other DNA
tttagtagtcaaggtt

SEQ ID NO: 1081 - DNA, 16 bp, synthetic construct
  source 1..16: mol_type = other DNA
taggtgaaaaaggtgt

SEQ ID NO: 1082 - DNA, 16 bp, synthetic construct
  source 1..16: mol_type = other DNA
acccaaccgatttttt

SEQ ID NO: 1083 - DNA, 16 bp, synthetic construct
  source 1..16: mol_type = other DNA
ctgaggtgaatgccct

SEQ ID NO: 1084 - DNA, 16 bp, synthetic construct
  source 1..16: mol_type = other DNA
ttgtgtgctccagtgg

SEQ ID NO: 1085 - DNA, 16 bp, synthetic construct
  source 1..16: mol_type = other DNA
tcactgaccatgtggg

SEQ ID NO: 1086 - DNA, 16 bp, synthetic construct
  source 1..16: mol_type = other DNA
cttcatgcacgggcgc

SEQ ID NO: 1087 - DNA, 16 bp, synthetic construct
  source 1..16: mol_type = other DNA
gcataatctcctgcct

SEQ ID NO: 1088 - DNA, 16 bp, synthetic construct
  source 1..16: mol_type = other DNA
gccataaatcttggga

SEQ ID NO: 1089 - DNA, 16 bp, synthetic construct
  source 1..16: mol_type = other DNA
ctttattcaatgtggc

SEQ ID NO: 1090 - DNA, 16 bp, synthetic construct
  source 1..16: mol_type = other DNA
tacaactgcctgtgtt

SEQ ID NO: 1091 - DNA, 16 bp, synthetic construct
  source 1..16: mol_type = other DNA
aaagcttccgcaaaca

SEQ ID NO: 1092 - DNA, 16 bp, synthetic construct
  source 1..16: mol_type = other DNA
ctaacatacaccctcg

SEQ ID NO: 1093 - DNA, 16 bp, synthetic construct
  source 1..16: mol_type = other DNA
agcttctgggacaagc

SEQ ID NO: 1094 - DNA, 16 bp, synthetic construct
  source 1..16: mol_type = other DNA
ggcatactaaaaccac

SEQ ID NO: 1095 - DNA, 16 bp, synthetic construct
  source 1..16: mol_type = other DNA
ttgaatgtcacccttc

SEQ ID NO: 1096 - DNA, 16 bp, synthetic construct
  source 1..16: mol_type = other DNA
agtcatgacatcccag

SEQ ID NO: 1097 - DNA, 16 bp, synthetic construct
  source 1..16: mol_type = other DNA
tctcattggcacctgt

SEQ ID NO: 1098 - DNA, 16 bp, synthetic construct
  source 1..16: mol_type = other DNA
ccctatcagatgccct

SEQ ID NO: 1099 - DNA, 16 bp, synthetic construct
  source 1..16: mol_type = other DNA
catatctggtttcatg

SEQ ID NO: 1100 - DNA, 16 bp, synthetic construct
  source 1..16: mol_type = other DNA
gaccatagcactgtct

SEQ ID NO: 1101 - DNA, 16 bp, synthetic construct
  source 1..16: mol_type = other DNA
attaatctggtcatat

SEQ ID NO: 1102 - DNA, 16 bp, synthetic construct
  source 1..16: mol_type = other DNA
tccataaaatacgccc

SEQ ID NO: 1103 - DNA, 16 bp, synthetic construct
  source 1..16: mol_type = other DNA
gaaagatggaattccc

SEQ ID NO: 1104 - DNA, 16 bp, synthetic construct
  source 1..16: mol_type = other DNA
tacgatcatcattatt

SEQ ID NO: 1105 - DNA, 16 bp, synthetic construct
  source 1..16: mol_type = other DNA
gtattagctcaatatt

SEQ ID NO: 1106 - DNA, 16 bp, synthetic construct
  source 1..16: mol_type = other DNA
gtttactagagactct

SEQ ID NO: 1107 - DNA, 16 bp, synthetic construct
  source 1..16: mol_type = other DNA
gtaaaaactgtaggat

SEQ ID NO: 1108 - DNA, 16 bp, synthetic construct
  source 1..16: mol_type = other DNA
gataaatgcctgacca

SEQ ID NO: 1109 - DNA, 16 bp, synthetic construct
  source 1..16: mol_type = other DNA
ccgacgggaagtcttc

SEQ ID NO: 1110 - DNA, 16 bp, synthetic construct
  source 1..16: mol_type = other DNA
ggcctatcagtttccc

SEQ ID NO: 1111 - DNA, 16 bp, synthetic construct
  source 1..16: mol_type = other DNA
tctcggccagggcatt

SEQ ID NO: 1112 - DNA, 16 bp, synthetic construct
  source 1..16: mol_type = other DNA
atccgcagcagctccg

SEQ ID NO: 1113 - DNA, 16 bp, synthetic construct
  source 1..16: mol_type = other DNA
ggcgcgggttaggatc

SEQ ID NO: 1114 - DNA, 16 bp, synthetic construct
  source 1..16: mol_type = other DNA
cagcgggtcgccccga

SEQ ID NO: 1115 - DNA, 16 bp, synthetic construct
  source 1..16: mol_type = other DNA
gataccggagaggacg

SEQ ID NO: 1116 - DNA, 16 bp, synthetic construct
  source 1..16: mol_type = other DNA
gcacaagatctgagag

SEQ ID NO: 1117 - DNA, 16 bp, synthetic construct
  source 1..16: mol_type = other DNA
tgccaatgttccgact

SEQ ID NO: 1118 - DNA, 16 bp, synthetic construct
  source 1..16: mol_type = other DNA
tcggaggaacttgctt

SEQ ID NO: 1119 - DNA, 16 bp, synthetic construct
  source 1..16: mol_type = other DNA
ttggccgggaggcatt

SEQ ID NO: 1120 - DNA, 16 bp, synthetic construct
  source 1..16: mol_type = other DNA
cctattttgccggaga

SEQ ID NO: 1121 - DNA, 16 bp, synthetic construct
  source 1..16: mol_type = other DNA
agacactctggtaaga

SEQ ID NO: 1122 - DNA, 16 bp, synthetic construct
  source 1..16: mol_type = other DNA
gacacggtgatggttg

SEQ ID NO: 1123 - DNA, 16 bp, synthetic construct
  source 1..16: mol_type = other DNA
gactgagcttggtgat

SEQ ID NO: 1124 - DNA, 16 bp, synthetic construct
  source 1..16: mol_type = other DNA
gacaaaagctctcgag

SEQ ID NO: 1125 - DNA, 16 bp, synthetic construct
  source 1..16: mol_type = other DNA
aacctgaatgcatcca

SEQ ID NO: 1126 - DNA, 16 bp, synthetic construct
  source 1..16: mol_type = other DNA
cctcaggatccatccc

SEQ ID NO: 1127 - DNA, 16 bp, synthetic construct
  source 1..16: mol_type = other DNA
aatccagactcatgtt

SEQ ID NO: 1128 - DNA, 16 bp, synthetic construct
  source 1..16: mol_type = other DNA
caggatgctgagacgc

SEQ ID NO: 1129 - DNA, 16 bp, synthetic construct
  source 1..16: mol_type = other DNA
ctcagtgctgtagcga

SEQ ID NO: 1130 - DNA, 16 bp, synthetic construct
  source 1..16: mol_type = other DNA
ttatcctaatgggtag

SEQ ID NO: 1131 - DNA, 16 bp, synthetic construct
  source 1..16: mol_type = other DNA
atcgcaatggcagatt

SEQ ID NO: 1132 - DNA, 16 bp, synthetic construct
  source 1..16: mol_type = other DNA
cacctgtgaggtcacc

SEQ ID NO: 1133 - DNA, 16 bp, synthetic construct
  source 1..16: mol_type = other DNA
cagacacatcagcact

SEQ ID NO: 1134 - DNA, 16 bp, synthetic construct
  source 1..16: mol_type = other DNA
ccagtcctgctcaggt

SEQ ID NO: 1135 - DNA, 16 bp, synthetic construct
  source 1..16: mol_type = other DNA
agaagaagttcaggct

SEQ ID NO: 1136 - DNA, 16 bp, synthetic construct
  source 1..16: mol_type = other DNA
aaaggtggagagcccc

SEQ ID NO: 1137 - DNA, 16 bp, synthetic construct
  source 1..16: mol_type = other DNA
gactcgcctcctcaag

SEQ ID NO: 1138 - DNA, 16 bp, synthetic construct
  source 1..16: mol_type = other DNA
ggtagctgcacaaaga

SEQ ID NO: 1139 - DNA, 16 bp, synthetic construct
  source 1..16: mol_type = other DNA
gaggctgggatcctcc

SEQ ID NO: 1140 - DNA, 16 bp, synthetic construct
  source 1..16: mol_type = other DNA
cgctgcacaggcgaaa

SEQ ID NO: 1141 - DNA, 16 bp, synthetic construct
  source 1..16: mol_type = other DNA
gatgtattagagttaa

SEQ ID NO: 1142 - DNA, 16 bp, synthetic construct
  source 1..16: mol_type = other DNA
caaccagctgaattaa

SEQ ID NO: 1143 - DNA, 16 bp, synthetic construct
  source 1..16: mol_type = other DNA
acagtcagtaagggac

SEQ ID NO: 1144 - DNA, 16 bp, synthetic construct
  source 1..16: mol_type = other DNA
ctgaccattaataggg

SEQ ID NO: 1145 - DNA, 16 bp, synthetic construct
  source 1..16: mol_type = other DNA
gtcattctaagaacct

SEQ ID NO: 1146 - DNA, 16 bp, synthetic construct
  source 1..16: mol_type = other DNA
cctaccccccatcaca

SEQ ID NO: 1147 - DNA, 16 bp, synthetic construct
  source 1..16: mol_type = other DNA
accccacaagatcaca

SEQ ID NO: 1148 - DNA, 16 bp, synthetic construct
  source 1..16: mol_type = other DNA
gcagaccacctgacag

SEQ ID NO: 1149 - DNA, 16 bp, synthetic construct
  source 1..16: mol_type = other DNA
ccccgccatggagacg

SEQ ID NO: 1150 - DNA, 16 bp, synthetic construct
  source 1..16: mol_type = other DNA
gttaggtgaaaaaggt

SEQ ID NO: 1151 - DNA, 16 bp, synthetic construct
  source 1..16: mol_type = other DNA
gcacccaaccgatttt

SEQ ID NO: 1152 - DNA, 16 bp, synthetic construct
  source 1..16: mol_type = other DNA
gctgaggtgaatgccc

SEQ ID NO: 1153 - DNA, 16 bp, synthetic construct
  source 1..16: mol_type = other DNA
gttgtgtgctccagtg

SEQ ID NO: 1154 - DNA, 16 bp, synthetic construct
  source 1..16: mol_type = other DNA
ctcactgaccatgtgg

SEQ ID NO: 1155 - DNA, 16 bp, synthetic construct
  source 1..16: mol_type = other DNA
gcaaatcggcccctcg

SEQ ID NO: 1156 - DNA, 16 bp, synthetic construct
  source 1..16: mol_type = other DNA
ggcataatctcctgcc

SEQ ID NO: 1157 - DNA, 16 bp, synthetic construct
  source 1..16: mol_type = other DNA
tggcatgcaagaccac

SEQ ID NO: 1158 - DNA, 16 bp, synthetic construct
  source 1..16: mol_type = other DNA
actttattcaatgtgg

SEQ ID NO: 1159 - DNA, 16 bp, synthetic construct
  source 1..16: mol_type = other DNA
gtttatgtcactctgg

SEQ ID NO: 1160 - DNA, 16 bp, synthetic construct
  source 1..16: mol_type = other DNA
gaacagacaagtgctg

SEQ ID NO: 1161 - DNA, 16 bp, synthetic construct
  source 1..16: mol_type = other DNA
actaacatacaccctc

SEQ ID NO: 1162 - DNA, 16 bp, synthetic construct
  source 1..16: mol_type = other DNA
ataatcagggtggtgc

SEQ ID NO: 1163 - DNA, 16 bp, synthetic construct
  source 1..16: mol_type = other DNA
aggcatactaaaacca

SEQ ID NO: 1164 - DNA, 16 bp, synthetic construct
  source 1..16: mol_type = other DNA
gaatcatgcaagctct

SEQ ID NO: 1165 - DNA, 16 bp, synthetic construct
  source 1..16: mol_type = other DNA
taaactaagggtcaca

SEQ ID NO: 1166 - DNA, 16 bp, synthetic construct
  source 1..16: mol_type = other DNA
atccatcctgcatgag

SEQ ID NO: 1167 - DNA, 16 bp, synthetic construct
  source 1..16: mol_type = other DNA
ggccctatcagatgcc

SEQ ID NO: 1168 - DNA, 16 bp, synthetic construct
  source 1..16: mol_type = other DNA
ctacatatctggtttc

SEQ ID NO: 1169 - DNA, 16 bp, synthetic construct
  source 1..16: mol_type = other DNA
tggaccatagcactgt

SEQ ID NO: 1170 - DNA, 16 bp, synthetic construct
  source 1..16: mol_type = other DNA
tattaatctggtcata

SEQ ID NO: 1171 - DNA, 16 bp, synthetic construct
  source 1..16: mol_type = other DNA
ccactttactctgttg

SEQ ID NO: 1172 - DNA, 16 bp, synthetic construct
  source 1..16: mol_type = other DNA
aactatgcctagaacg

SEQ ID NO: 1173 - DNA, 16 bp, synthetic construct
  source 1..16: mol_type = other DNA
tttacgatcatcatta

SEQ ID NO: 1174 - DNA, 16 bp, synthetic construct
  source 1..16: mol_type = other DNA
tgtattagctcaatat

SEQ ID NO: 1175 - DNA, 16 bp, synthetic construct
  source 1..16: mol_type = other DNA
tgggagtttactagag

SEQ ID NO: 1176 - DNA, 16 bp, synthetic construct
  source 1..16: mol_type = other DNA
agagagtactcttgga

SEQ ID NO: 1177 - DNA, 16 bp, synthetic construct
  source 1..16: mol_type = other DNA
ctgataaatgcctgac

SEQ ID NO: 1178 - DNA, 16 bp, synthetic construct
  source 1..16: mol_type = other DNA
atcaatgctgcactca

SEQ ID NO: 1179 - DNA, 16 bp, synthetic construct
  source 1..16: mol_type = other DNA
acgaatccctggaggg

SEQ ID NO: 1180 - DNA, 16 bp, synthetic construct
  source 1..16: mol_type = other DNA
gtctcggccagggcat

SEQ ID NO: 1181 - DNA, 16 bp, synthetic construct
  source 1..16: mol_type = other DNA
ctgatccgcagcagct

SEQ ID NO: 1182 - DNA, 16 bp, synthetic construct
  source 1..16: mol_type = other DNA
cgtacatggcggcggc

SEQ ID NO: 1183 - DNA, 16 bp, synthetic construct
  source 1..16: mol_type = other DNA
gcagcgggtcgccccg

SEQ ID NO: 1184 - DNA, 16 bp, synthetic construct
  source 1..16: mol_type = other DNA
ggataccggagaggac

SEQ ID NO: 1185 - DNA, 16 bp, synthetic construct
  source 1..16: mol_type = other DNA
cgcacaagatctgaga

SEQ ID NO: 1186 - DNA, 16 bp, synthetic construct
  source 1..16: mol_type = other DNA
atgccaatgttccgac

SEQ ID NO: 1187 - DNA, 16 bp, synthetic construct
  source 1..16: mol_type = other DNA
gtcggaggaacttgct

SEQ ID NO: 1188 - DNA, 16 bp, synthetic construct
  source 1..16: mol_type = other DNA
attggccgggaggcat

SEQ ID NO: 1189 - DNA, 16 bp, synthetic construct
  source 1..16: mol_type = other DNA
gcctattttgccggag

SEQ ID NO: 1190 - DNA, 16 bp, synthetic construct
  source 1..16: mol_type = other DNA
cagacactctggtaag

SEQ ID NO: 1191 - DNA, 16 bp, synthetic construct
  source 1..16: mol_type = other DNA
tactccccatagaagg

SEQ ID NO: 1192 - DNA, 16 bp, synthetic construct
  source 1..16: mol_type = other DNA
tagactgagcttggtg

SEQ ID NO: 1193 - DNA, 16 bp, synthetic construct
  source 1..16: mol_type = other DNA
ggacaaaagctctcga

SEQ ID NO: 1194 - DNA, 16 bp, synthetic construct
  source 1..16: mol_type = other DNA
gaacctgaatgcatcc

SEQ ID NO: 1195 - DNA, 16 bp, synthetic construct
  source 1..16: mol_type = other DNA
cgacctcaggatccat

SEQ ID NO: 1196 - DNA, 16 bp, synthetic construct
  source 1..16: mol_type = other DNA
gaatccagactcatgt

SEQ ID NO: 1197 - DNA, 16 bp, synthetic construct
  source 1..16: mol_type = other DNA
gcaggatgctgagacg

SEQ ID NO: 1198 - DNA, 16 bp, synthetic construct
  source 1..16: mol_type = other DNA
actcagtgctgtagcg

SEQ ID NO: 1199 - DNA, 16 bp, synthetic construct
  source 1..16: mol_type = other DNA
attatcctaatgggta

SEQ ID NO: 1200 - DNA, 16 bp, synthetic construct
  source 1..16: mol_type = other DNA
aatcgcaatggcagat

SEQ ID NO: 1201 - DNA, 16 bp, synthetic construct
  source 1..16: mol_type = other DNA
aacacctgtgaggtca

SEQ ID NO: 1202 - DNA, 16 bp, synthetic construct
  source 1..16: mol_type = other DNA
ggagcagacacatcag

SEQ ID NO: 1203 - DNA, 16 bp, synthetic construct
  source 1..16: mol_type = other DNA
gccagtcctgctcagg

SEQ ID NO: 1204 - DNA, 16 bp, synthetic construct
  source 1..16: mol_type = other DNA
aagaagaagttcaggc

SEQ ID NO: 1205 - DNA, 16 bp, synthetic construct
  source 1..16: mol_type = other DNA
gaaaggtggagagccc

SEQ ID NO: 1206 - DNA, 16 bp, synthetic construct
  source 1..16: mol_type = other DNA
tagactcgcctcctca

SEQ ID NO: 1207 - DNA, 16 bp, synthetic construct
  source 1..16: mol_type = other DNA
gaggtagctgcacaaa

SEQ ID NO: 1208 - DNA, 16 bp, synthetic construct
  source 1..16: mol_type = other DNA
aactcagctcagaggc

SEQ ID NO: 1209 - DNA, 16 bp, synthetic construct
  source 1..16: mol_type = other DNA
ccgctgcacaggcgaa

SEQ ID NO: 1210 - DNA, 16 bp, synthetic construct
  source 1..16: mol_type = other DNA
ctgatgtattagagtt

SEQ ID NO: 1211 - DNA, 16 bp, synthetic construct
  source 1..16: mol_type = other DNA
ccaaccagctgaatta

SEQ ID NO: 1212 - DNA, 16 bp, synthetic construct
  source 1..16: mol_type = other DNA
aacagtcagtaaggga

SEQ ID NO: 1213 - DNA, 16 bp, synthetic construct
  source 1..16: mol_type = other DNA
tctgaccattaatagg

SEQ ID NO: 1214 - DNA, 16 bp, synthetic construct
  source 1..16: mol_type = other DNA
tgtcattctaagaacc

SEQ ID NO: 1215 - DNA, 16 bp, synthetic construct
  source 1..16: mol_type = other DNA
gcctaccccccatcac

SEQ ID NO: 1216 - DNA, 16 bp, synthetic construct
  source 1..16: mol_type = other DNA
caccccacaagatcac

SEQ ID NO: 1217 - DNA, 16 bp, synthetic construct
  source 1..16: mol_type = other DNA
tgcagaccacctgaca

SEQ ID NO: 1218 - DNA, 16 bp, synthetic construct
  source 1..16: mol_type = other DNA
cccccgccatggagac

SEQ ID NO: 1219 - DNA, 16 bp, synthetic construct
  source 1..16: mol_type = other DNA
cgcttccttacatttt

SEQ ID NO: 1220 - DNA, 16 bp, synthetic construct
  source 1..16: mol_type = other DNA
tgcacccaaccgattt

SEQ ID NO: 1221 - DNA, 16 bp, synthetic construct
  source 1..16: mol_type = other DNA
ggctgaggtgaatgcc

SEQ ID NO: 1222 - DNA, 16 bp, synthetic construct
  source 1..16: mol_type = other DNA
agttgtgtgctccagt

SEQ ID NO: 1223 - DNA, 16 bp, synthetic construct
  source 1..16: mol_type = other DNA
actcactgaccatgtg

SEQ ID NO: 1224 - DNA, 16 bp, synthetic construct
  source 1..16: mol_type = other DNA
ggccaaagccccactc

SEQ ID NO: 1225 - DNA, 16 bp, synthetic construct
  source 1..16: mol_type = other DNA
gggcataatctcctgc

SEQ ID NO: 1226 - DNA, 16 bp, synthetic construct
  source 1..16: mol_type = other DNA
ggctgatctgcactct

SEQ ID NO: 1227 - DNA, 16 bp, synthetic construct
  source 1..16: mol_type = other DNA
taattctacctgtgtc

SEQ ID NO: 1228 - DNA, 16 bp, synthetic construct
  source 1..16: mol_type = other DNA
agtttatgtcactctg

SEQ ID NO: 1229 - DNA, 16 bp, synthetic construct
  source 1..16: mol_type = other DNA
acactttgcgaagcac

SEQ ID NO: 1230 - DNA, 16 bp, synthetic construct
  source 1..16: mol_type = other DNA
gaactaacatacaccc

SEQ ID NO: 1231 - DNA, 16 bp, synthetic construct
  source 1..16: mol_type = other DNA
cccataatcagggtgg

SEQ ID NO: 1232 - DNA, 16 bp, synthetic construct
  source 1..16: mol_type = other DNA
gtagagtggtaaggca

SEQ ID NO: 1233 - DNA, 16 bp, synthetic construct
  source 1..16: mol_type = other DNA
aagaatcatgcaagct

SEQ ID NO: 1234 - DNA, 16 bp, synthetic construct
  source 1..16: mol_type = other DNA
ttaaactaagggtcac

SEQ ID NO: 1235 - DNA, 16 bp, synthetic construct
  source 1..16: mol_type = other DNA
ttaatgtggattcacg

SEQ ID NO: 1236 - DNA, 16 bp, synthetic construct
  source 1..16: mol_type = other DNA
ccaagataacctcaca

SEQ ID NO: 1237 - DNA, 16 bp, synthetic construct
  source 1..16: mol_type = other DNA
ccatctacatatctgg

SEQ ID NO: 1238 - DNA, 16 bp, synthetic construct
  source 1..16: mol_type = other DNA
cacaatcatttggacc

SEQ ID NO: 1239 - DNA, 16 bp, synthetic construct
  source 1..16: mol_type = other DNA
gtattaatctggtcat

SEQ ID NO: 1240 - DNA, 16 bp, synthetic construct
  source 1..16: mol_type = other DNA
cacctctggacaatcg

SEQ ID NO: 1241 - DNA, 16 bp, synthetic construct
  source 1..16: mol_type = other DNA
caaactatgcctagaa

SEQ ID NO: 1242 - DNA, 16 bp, synthetic construct
  source 1..16: mol_type = other DNA
attttacgatcatcat

SEQ ID NO: 1243 - DNA, 16 bp, synthetic construct
  source 1..16: mol_type = other DNA
tgcctgtattagctca

SEQ ID NO: 1244 - DNA, 16 bp, synthetic construct
  source 1..16: mol_type = other DNA
cacataaagtcaaacg

SEQ ID NO: 1245 - DNA, 16 bp, synthetic construct
  source 1..16: mol_type = other DNA
agaacaagagagtact

SEQ ID NO: 1246 - DNA, 16 bp, synthetic construct
  source 1..16: mol_type = other DNA
cacataaaggaccccc

SEQ ID NO: 1247 - DNA, 16 bp, synthetic construct
  source 1..16: mol_type = other DNA
cgctatctgacactcc

SEQ ID NO: 1248 - DNA, 16 bp, synthetic construct
  source 1..16: mol_type = other DNA
tccaccaacgaatccc

SEQ ID NO: 1249 - DNA, 16 bp, synthetic construct
  source 1..16: mol_type = other DNA
tgtctcggccagggca

SEQ ID NO: 1250 - DNA, 16 bp, synthetic construct
  source 1..16: mol_type = other DNA
cctgatccgcagcagc

SEQ ID NO: 1251 - DNA, 16 bp, synthetic construct
  source 1..16: mol_type = other DNA
ccagccgcgctctgcg

SEQ ID NO: 1252 - DNA, 16 bp, synthetic construct
  source 1..16: mol_type = other DNA
ggcagcgggtcgcccc

SEQ ID NO: 1253 - DNA, 16 bp, synthetic construct
  source 1..16: mol_type = other DNA
cgggataccggagagg

SEQ ID NO: 1254 - DNA, 16 bp, synthetic construct
  source 1..16: mol_type = other DNA
ccgcacaagatctgag

SEQ ID NO: 1255 - DNA, 16 bp, synthetic construct
  source 1..16: mol_type = other DNA
gatgccaatgttccga

SEQ ID NO: 1256 - DNA, 16 bp, synthetic construct
  source 1..16: mol_type = other DNA
tgtcggaggaacttgc

SEQ ID NO: 1257 - DNA, 16 bp, synthetic construct
  source 1..16: mol_type = other DNA
cattggccgggaggca

SEQ ID NO: 1258 - DNA, 16 bp, synthetic construct
  source 1..16: mol_type = other DNA
tgcctattttgccgga

SEQ ID NO: 1259 - DNA, 16 bp, synthetic construct
  source 1..16: mol_type = other DNA
tcagacactctggtaa

SEQ ID NO: 1260 - DNA, 16 bp, synthetic construct
  source 1..16: mol_type = other DNA
cgtactccccatagaa

SEQ ID NO: 1261 - DNA, 16 bp, synthetic construct
  source 1..16: mol_type = other DNA
cgtagactgagcttgg

SEQ ID NO: 1262 - DNA, 16 bp, synthetic construct
  source 1..16: mol_type = other DNA
caccttgagatccggg

SEQ ID NO: 1263 - DNA, 16 bp, synthetic construct
  source 1..16: mol_type = other DNA
agaacctgaatgcatc

SEQ ID NO: 1264 - DNA, 16 bp, synthetic construct
  source 1..16: mol_type = other DNA
gcgacctcaggatcca

SEQ ID NO: 1265 - DNA, 16 bp, synthetic construct
  source 1..16: mol_type = other DNA
ggcagccgactccggg

SEQ ID NO: 1266 - DNA, 16 bp, synthetic construct
  source 1..16: mol_type = other DNA
caggatgctctcatcc

SEQ ID NO: 1267 - DNA, 16 bp, synthetic construct
  source 1..16: mol_type = other DNA
cactcagtgctgtagc

SEQ ID NO: 1268 - DNA, 16 bp, synthetic construct
  source 1..16: mol_type = other DNA
agacattatcctaatg

SEQ ID NO: 1269 - DNA, 16 bp, synthetic construct
  source 1..16: mol_type = other DNA
caatcgcaatggcaga

SEQ ID NO: 1270 - DNA, 16 bp, synthetic construct
  source 1..16: mol_type = other DNA
gaacacctgtgaggtc

SEQ ID NO: 1271 - DNA, 16 bp, synthetic construct
  source 1..16: mol_type = other DNA
ggctgctcactggcat

SEQ ID NO: 1272 - DNA, 16 bp, synthetic construct
  source 1..16: mol_type = other DNA
ggccagtcctgctcag

SEQ ID NO: 1273 - DNA, 16 bp, synthetic construct
  source 1..16: mol_type = other DNA
cccaagaagaagttca

SEQ ID NO: 1274 - DNA, 16 bp, synthetic construct
  source 1..16: mol_type = other DNA
ggaaaggtggagagcc

SEQ ID NO: 1275 - DNA, 16 bp, synthetic construct
  source 1..16: mol_type = other DNA
ctagactcgcctcctc

SEQ ID NO: 1276 - DNA, 16 bp, synthetic construct
  source 1..16: mol_type = other DNA
gcggaggtagctgcac

SEQ ID NO: 1277 - DNA, 16 bp, synthetic construct
  source 1..16: mol_type = other DNA
caactcagctcagagg

SEQ ID NO: 1278 - DNA, 16 bp, synthetic construct
  source 1..16: mol_type = other DNA
accgctgcacaggcga

SEQ ID NO: 1279 - DNA, 16 bp, synthetic construct
  source 1..16: mol_type = other DNA
tgctgatgtattagag

SEQ ID NO: 1280 - DNA, 16 bp, synthetic construct
  source 1..16: mol_type = other DNA
cccaaccagctgaatt

SEQ ID NO: 1281 - DNA, 16 bp, synthetic construct
  source 1..16: mol_type = other DNA
aaacagtcagtaaggg

SEQ ID NO: 1282 - DNA, 16 bp, synthetic construct
  source 1..16: mol_type = other DNA
gtctgaccattaatag

SEQ ID NO: 1283 - DNA, 16 bp, synthetic construct
  source 1..16: mol_type = other DNA
ctgtcattctaagaac

SEQ ID NO: 1284 - DNA, 16 bp, synthetic construct
  source 1..16: mol_type = other DNA
agcctaccccccatca

SEQ ID NO: 1285 - DNA, 16 bp, synthetic construct
  source 1..16: mol_type = other DNA
ccaccccacaagatca

SEQ ID NO: 1286 - DNA, 16 bp, synthetic construct
  source 1..16: mol_type = other DNA
ttgcagaccacctgac

SEQ ID NO: 1287 - DNA, 16 bp, synthetic construct
  source 1..16: mol_type = other DNA
acccccgccatggaga

SEQ ID NO: 1288 - DNA, 16 bp, synthetic construct
  source 1..16: mol_type = other DNA
acgcttccttacattt

SEQ ID NO: 1289 - DNA, 16 bp, synthetic construct
  source 1..16: mol_type = other DNA
ctgcacccaaccgatt

SEQ ID NO: 1290 - DNA, 16 bp, synthetic construct
  source 1..16: mol_type = other DNA
gggctgaggtgaatgc

SEQ ID NO: 1291 - DNA, 16 bp, synthetic construct
  source 1..16: mol_type = other DNA
aagttgtgtgctccag

SEQ ID NO: 1292 - DNA, 16 bp, synthetic construct
  source 1..16: mol_type = other DNA
gaaactcactgaccat

SEQ ID NO: 1293 - DNA, 16 bp, synthetic construct
  source 1..16: mol_type = other DNA
ggaaacaactttcctc

SEQ ID NO: 1294 - DNA, 16 bp, synthetic construct
  source 1..16: mol_type = other DNA
gatcatgtggcggtct

SEQ ID NO: 1295 - DNA, 16 bp, synthetic construct
  source 1..16: mol_type = other DNA
cacttactggcctggc

SEQ ID NO: 1296 - DNA, 16 bp, synthetic construct
  source 1..16: mol_type = other DNA
atattgggctcaatga

SEQ ID NO: 1297 - DNA, 16 bp, synthetic construct
  source 1..16: mol_type = other DNA
atcactggaggtgtac

SEQ ID NO: 1298 - DNA, 16 bp, synthetic construct
  source 1..16: mol_type = other DNA
caggatcacactttgc

SEQ ID NO: 1299 - DNA, 16 bp, synthetic construct
  source 1..16: mol_type = other DNA
ggaactaacatacacc

SEQ ID NO: 1300 - DNA, 16 bp, synthetic construct
  source 1..16: mol_type = other DNA
gtatatgttcccaggt

SEQ ID NO: 1301 - DNA, 16 bp, synthetic construct
  source 1..16: mol_type = other DNA
gtgtacatggtctgca

SEQ ID NO: 1302 - DNA, 16 bp, synthetic construct
  source 1..16: mol_type = other DNA
atcattggaagaccgc

SEQ ID NO: 1303 - DNA, 16 bp, synthetic construct
  source 1..16: mol_type = other DNA
gttaaactaagggtca

SEQ ID NO: 1304 - DNA, 16 bp, synthetic construct
  source 1..16: mol_type = other DNA
cttaatgtggattcac

SEQ ID NO: 1305 - DNA, 16 bp, synthetic construct
  source 1..16: mol_type = other DNA
tccaacttcaggctga

SEQ ID NO: 1306 - DNA, 16 bp, synthetic construct
  source 1..16: mol_type = other DNA
agctttgtgggctcca

SEQ ID NO: 1307 - DNA, 16 bp, synthetic construct
  source 1..16: mol_type = other DNA
gtttaataagggcacc

SEQ ID NO: 1308 - DNA, 16 bp, synthetic construct
  source 1..16: mol_type = other DNA
cgtattaatctggtca

SEQ ID NO: 1309 - DNA, 16 bp, synthetic construct
  source 1..16: mol_type = other DNA
cacctaaaatgctcac

SEQ ID NO: 1310 - DNA, 16 bp, synthetic construct
  source 1..16: mol_type = other DNA
acaaactatgcctaga

SEQ ID NO: 1311 - DNA, 16 bp, synthetic construct
  source 1..16: mol_type = other DNA
aattttacgatcatca

SEQ ID NO: 1312 - DNA, 16 bp, synthetic construct
  source 1..16: mol_type = other DNA
gacagatcagcactcg

SEQ ID NO: 1313 - DNA, 16 bp, synthetic construct
  source 1..16: mol_type = other DNA
caattctagacatggc

SEQ ID NO: 1314 - DNA, 16 bp, synthetic construct
  source 1..16: mol_type = other DNA
tgcacctacccttttc

SEQ ID NO: 1315 - DNA, 16 bp, synthetic construct
  source 1..16: mol_type = other DNA
acacataaaggacccc

SEQ ID NO: 1316 - DNA, 16 bp, synthetic construct
  source 1..16: mol_type = other DNA
gcattaccaggcacct

SEQ ID NO: 1317 - DNA, 16 bp, synthetic construct
  source 1..16: mol_type = other DNA
gacatcacaggtgttg

SEQ ID NO: 1318 - DNA, 16 bp, synthetic construct
  source 1..16: mol_type = other DNA
gtgtctcggccagggc

SEQ ID NO: 1319 - DNA, 16 bp, synthetic construct
  source 1..16: mol_type = other DNA
gtcctgatccgcagca

SEQ ID NO: 1320 - DNA, 16 bp, synthetic construct
  source 1..16: mol_type = other DNA
ctccagccgcgctctg

SEQ ID NO: 1321 - DNA, 16 bp, synthetic construct
  source 1..16: mol_type = other DNA
aggcagcgggtcgccc

SEQ ID NO: 1322 - DNA, 16 bp, synthetic construct
  source 1..16: mol_type = other DNA
gcgggataccggagag

SEQ ID NO: 1323 - DNA, 16 bp, synthetic construct
  source 1..16: mol_type = other DNA
tccgcacaagatctga

SEQ ID NO: 1324 - DNA, 16 bp, synthetic construct
  source 1..16: mol_type = other DNA
agatgccaatgttccg

SEQ ID NO: 1325 - DNA, 16 bp, synthetic construct
  source 1..16: mol_type = other DNA
ctgtcggaggaacttg

SEQ ID NO: 1326 - DNA, 16 bp, synthetic construct
  source 1..16: mol_type = other DNA
acattggccgggaggc

SEQ ID NO: 1327 - DNA, 16 bp, synthetic construct
  source 1..16: mol_type = other DNA
atgcctattttgccgg

SEQ ID NO: 1328 - DNA, 16 bp, synthetic construct
  source 1..16: mol_type = other DNA
atcagacactctggta

SEQ ID NO: 1329 - DNA, 16 bp, synthetic construct
  source 1..16: mol_type = other DNA
actttagggcagatgt

SEQ ID NO: 1330 - DNA, 16 bp, synthetic construct
  source 1..16: mol_type = other DNA
gtagaggttccctgtg

SEQ ID NO: 1331 - DNA, 16 bp, synthetic construct
  source 1..16: mol_type = other DNA
agcaccttgagatccg

SEQ ID NO: 1332 - DNA, 16 bp, synthetic construct
  source 1..16: mol_type = other DNA
gttgcagatgcccttc

SEQ ID NO: 1333 - DNA, 16 bp, synthetic construct
  source 1..16: mol_type = other DNA
ggcgacctcaggatcc

SEQ ID NO: 1334 - DNA, 16 bp, synthetic construct
  source 1..16: mol_type = other DNA
aggcagccgactccgg

SEQ ID NO: 1335 - DNA, 16 bp, synthetic construct
  source 1..16: mol_type = other DNA
gtgtccaggatgctct

SEQ ID NO: 1336 - DNA, 16 bp, synthetic construct
  source 1..16: mol_type = other DNA
tcactcagtgctgtag

SEQ ID NO: 1337 - DNA, 16 bp, synthetic construct
  source 1..16: mol_type = other DNA
ataagacattatccta

SEQ ID NO: 1338 - DNA, 16 bp, synthetic construct
  source 1..16: mol_type = other DNA
acaatcgcaatggcag

SEQ ID NO: 1339 - DNA, 16 bp, synthetic construct
  source 1..16: mol_type = other DNA
gtgaacacctgtgagg

SEQ ID NO: 1340 - DNA, 16 bp, synthetic construct
  source 1..16: mol_type = other DNA
ttggctgctcactggc

SEQ ID NO: 1341 - DNA, 16 bp, synthetic construct
  source 1..16: mol_type = other DNA
gggccagtcctgctca

SEQ ID NO: 1342 - DNA, 16 bp, synthetic construct
  source 1..16: mol_type = other DNA
gcccaagaagaagttc

SEQ ID NO: 1343 - DNA, 16 bp, synthetic construct
  source 1..16: mol_type = other DNA
ctagtgaaaaactggg

SEQ ID NO: 1344 - DNA, 16 bp, synthetic construct
  source 1..16: mol_type = other DNA
gctagactcgcctcct

SEQ ID NO: 1345 - DNA, 16 bp, synthetic construct
  source 1..16: mol_type = other DNA
tgcggaggtagctgca

SEQ ID NO: 1346 - DNA, 16 bp, synthetic construct
  source 1..16: mol_type = other DNA
cctagcttttcataaa

SEQ ID NO: 1347 - DNA, 16 bp, synthetic construct
  source 1..16: mol_type = other DNA
gaccgctgcacaggcg

SEQ ID NO: 1348 - DNA, 16 bp, synthetic construct
  source 1..16: mol_type = other DNA
atgctgatgtattaga

SEQ ID NO: 1349 - DNA, 16 bp, synthetic construct
  source 1..16: mol_type = other DNA
tcccaaccagctgaat

SEQ ID NO: 1350 - DNA, 16 bp, synthetic construct
  source 1..16: mol_type = other DNA
gaaacagtcagtaagg

SEQ ID NO: 1351 - DNA, 16 bp, synthetic construct
  source 1..16: mol_type = other DNA
agtctgaccattaata

SEQ ID NO: 1352 - DNA, 16 bp, synthetic construct
  source 1..16: mol_type = other DNA
acctgtcattctaaga

SEQ ID NO: 1353 - DNA, 16 bp, synthetic construct
  source 1..16: mol_type = other DNA
cagcctaccccccatc

SEQ ID NO: 1354 - DNA, 16 bp, synthetic construct
  source 1..16: mol_type = other DNA
ctccaccccacaagat

SEQ ID NO: 1355 - DNA, 16 bp, synthetic construct
  source 1..16: mol_type = other DNA
ctttgcagaccacctg

SEQ ID NO: 1356 - DNA, 16 bp, synthetic construct
  source 1..16: mol_type = other DNA
tacccccgccatggag

SEQ ID NO: 1357 - DNA, 16 bp, synthetic construct
  source 1..16: mol_type = other DNA
caacaggtaacaacgc

SEQ ID NO: 1358 - DNA, 16 bp, synthetic construct
  source 1..16: mol_type = other DNA
gtcagactttcactca

SEQ ID NO: 1359 - DNA, 16 bp, synthetic construct
  source 1..16: mol_type = other DNA
gtgcttggctcctgcc

SEQ ID NO: 1360 - DNA, 16 bp, synthetic construct
  source 1..16: mol_type = other DNA
caagttgtgtgctcca

SEQ ID NO: 1361 - DNA, 16 bp, synthetic construct
  source 1..16: mol_type = other DNA
catcgccacacatggg

SEQ ID NO: 1362 - DNA, 16 bp, synthetic construct
  source 1..16: mol_type = other DNA
aggaagggtcccaaac

SEQ ID NO: 1363 - DNA, 16 bp, synthetic construct
  source 1..16: mol_type = other DNA
tgatcatgtggcggtc

SEQ ID NO: 1364 - DNA, 16 bp, synthetic construct
  source 1..16: mol_type = other DNA
tgctatcaggtgcagg

SEQ ID NO: 1365 - DNA, 16 bp, synthetic construct
  source 1..16: mol_type = other DNA
tatattgggctcaatg

SEQ ID NO: 1366 - DNA, 16 bp, synthetic construct
  source 1..16: mol_type = other DNA
gtttacaaacatggac

SEQ ID NO: 1367 - DNA, 16 bp, synthetic construct
  source 1..16: mol_type = other DNA
tcattagcatcaccgg

SEQ ID NO: 1368 - DNA, 16 bp, synthetic construct
  source 1..16: mol_type = other DNA
gggaactaacatacac

SEQ ID NO: 1369 - DNA, 16 bp, synthetic construct
  source 1..16: mol_type = other DNA
gggtatatgttcccag

SEQ ID NO: 1370 - DNA, 16 bp, synthetic construct
  source 1..16: mol_type = other DNA
tgcatagccttctttc

SEQ ID NO: 1371 - DNA, 16 bp, synthetic construct
  source 1..16: mol_type = other DNA
catcattggaagaccg

SEQ ID NO: 1372 - DNA, 16 bp, synthetic construct
  source 1..16: mol_type = other DNA
tctttaacttcggccc

SEQ ID NO: 1373 - DNA, 16 bp, synthetic construct
  source 1..16: mol_type = other DNA
tcttaatgtggattca

SEQ ID NO: 1374 - DNA, 16 bp, synthetic construct
  source 1..16: mol_type = other DNA
tcagacaaccacagct

SEQ ID NO: 1375 - DNA, 16 bp, synthetic construct
  source 1..16: mol_type = other DNA
taaagcaggacacacg

SEQ ID NO: 1376 - DNA, 16 bp, synthetic construct
  source 1..16: mol_type = other DNA
agacatgttggtgtct

SEQ ID NO: 1377 - DNA, 16 bp, synthetic construct
  source 1..16: mol_type = other DNA
ccccagtcttttattc

SEQ ID NO: 1378 - DNA, 16 bp, synthetic construct
  source 1..16: mol_type = other DNA
ggaagacacggagcca

SEQ ID NO: 1379 - DNA, 16 bp, synthetic construct
  source 1..16: mol_type = other DNA
cctaactgctggctct

SEQ ID NO: 1380 - DNA, 16 bp, synthetic construct
  source 1..16: mol_type = other DNA
taattttacgatcatc

SEQ ID NO: 1381 - DNA, 16 bp, synthetic construct
  source 1..16: mol_type = other DNA
ctctttgtagcagaca

SEQ ID NO: 1382 - DNA, 16 bp, synthetic construct
  source 1..16: mol_type = other DNA
caatatactgagagga

SEQ ID NO: 1383 - DNA, 16 bp, synthetic construct
  source 1..16: mol_type = other DNA
gtagacatccttcccg

SEQ ID NO: 1384 - DNA, 16 bp, synthetic construct
  source 1..16: mol_type = other DNA
gacacataaaggaccc

SEQ ID NO: 1385 - DNA, 16 bp, synthetic construct
  source 1..16: mol_type = other DNA
tgcattaccaggcacc

SEQ ID NO: 1386 - DNA, 16 bp, synthetic construct
  source 1..16: mol_type = other DNA
ggacatcacaggtgtt

SEQ ID NO: 1387 - DNA, 16 bp, synthetic construct
  source 1..16: mol_type = other DNA
agtgtctcggccaggg

SEQ ID NO: 1388 - DNA, 16 bp, synthetic construct
  source 1..16: mol_type = other DNA
ggtcctgatccgcagc

SEQ ID NO: 1389 - DNA, 16 bp, synthetic construct
  source 1..16: mol_type = other DNA
gctccagccgcgctct

SEQ ID NO: 1390 - DNA, 16 bp, synthetic construct
  source 1..16: mol_type = other DNA
caggcagcgggtcgcc

SEQ ID NO: 1391 - DNA, 16 bp, synthetic construct
  source 1..16: mol_type = other DNA
agcgggataccggaga

SEQ ID NO: 1392 - DNA, 16 bp, synthetic construct
  source 1..16: mol_type = other DNA
ttccgcacaagatctg

SEQ ID NO: 1393 - DNA, 16 bp, synthetic construct
  source 1..16: mol_type = other DNA
aagatgccaatgttcc

SEQ ID NO: 1394 - DNA, 16 bp, synthetic construct
  source 1..16: mol_type = other DNA
ccctgtcggaggaact

SEQ ID NO: 1395 - DNA, 16 bp, synthetic construct
  source 1..16: mol_type = other DNA
ggacattggccgggag

SEQ ID NO: 1396 - DNA, 16 bp, synthetic construct
  source 1..16: mol_type = other DNA
gatgcctattttgccg

SEQ ID NO: 1397 - DNA, 16 bp, synthetic construct
  source 1..16: mol_type = other DNA
ccatcagacactctgg

SEQ ID NO: 1398 - DNA, 16 bp, synthetic construct
  source 1..16: mol_type = other DNA
caggaacataccaagg

SEQ ID NO: 1399 - DNA, 16 bp, synthetic construct
  source 1..16: mol_type = other DNA
gttgtcactcactcct

SEQ ID NO: 1400 - DNA, 16 bp, synthetic construct
  source 1..16: mol_type = other DNA
gactttagggcagatg

SEQ ID NO: 1401 - DNA, 16 bp, synthetic construct
  source 1..16: mol_type = other DNA
ggtagaggttccctgt

SEQ ID NO: 1402 - DNA, 16 bp, synthetic construct
  source 1..16: mol_type = other DNA
cagcaccttgagatcc

SEQ ID NO: 1403 - DNA, 16 bp, synthetic construct
  source 1..16: mol_type = other DNA
ctgttgcagatgccct

SEQ ID NO: 1404 - DNA, 16 bp, synthetic construct
  source 1..16: mol_type = other DNA
tggcgacctcaggatc

SEQ ID NO: 1405 - DNA, 16 bp, synthetic construct
  source 1..16: mol_type = other DNA
aaggcagccgactccg

SEQ ID NO: 1406 - DNA, 16 bp, synthetic construct
  source 1..16: mol_type = other DNA
ggtgtccaggatgctc

SEQ ID NO: 1407 - DNA, 16 bp, synthetic construct
  source 1..16: mol_type = other DNA
ttcactcagtgctgta

SEQ ID NO: 1408 - DNA, 16 bp, synthetic construct
  source 1..16: mol_type = other DNA
acataagacattatcc

SEQ ID NO: 1409 - DNA, 16 bp, synthetic construct
  source 1..16: mol_type = other DNA
ctggacaatcgcaatg

SEQ ID NO: 1410 - DNA, 16 bp, synthetic construct
  source 1..16: mol_type = other DNA
gagtgaacacctgtga

SEQ ID NO: 1411 - DNA, 16 bp, synthetic construct
  source 1..16: mol_type = other DNA
gttggctgctcactgg

SEQ ID NO: 1412 - DNA, 16 bp, synthetic construct
  source 1..16: mol_type = other DNA
agggccagtcctgctc

SEQ ID NO: 1413 - DNA, 16 bp, synthetic construct
  source 1..16: mol_type = other DNA
attgcccaagaagaag

SEQ ID NO: 1414 - DNA, 16 bp, synthetic construct
  source 1..16: mol_type = other DNA
tctagtgaaaaactgg

SEQ ID NO: 1415 - DNA, 16 bp, synthetic construct
  source 1..16: mol_type = other DNA
tgctagactcgcctcc

SEQ ID NO: 1416 - DNA, 16 bp, synthetic construct
  source 1..16: mol_type = other DNA
atgcggaggtagctgc

SEQ ID NO: 1417 - DNA, 16 bp, synthetic construct
  source 1..16: mol_type = other DNA
ggttgcttcctagctt

SEQ ID NO: 1418 - DNA, 16 bp, synthetic construct
  source 1..16: mol_type = other DNA
ggaccgctgcacaggc

SEQ ID NO: 1419 - DNA, 16 bp, synthetic construct
  source 1..16: mol_type = other DNA
catgctgatgtattag

SEQ ID NO: 1420 - DNA, 16 bp, synthetic construct
  source 1..16: mol_type = other DNA
ttcccaaccagctgaa

SEQ ID NO: 1421 - DNA, 16 bp, synthetic construct
  source 1..16: mol_type = other DNA
cgaaacagtcagtaag

SEQ ID NO: 1422 - DNA, 16 bp, synthetic construct
  source 1..16: mol_type = other DNA
aacagtctgaccatta

SEQ ID NO: 1423 - DNA, 16 bp, synthetic construct
  source 1..16: mol_type = other DNA
cacctgtcattctaag

SEQ ID NO: 1424 - DNA, 16 bp, synthetic construct
  source 1..16: mol_type = other DNA
ccagcctaccccccat

SEQ ID NO: 1425 - DNA, 16 bp, synthetic construct
  source 1..16: mol_type = other DNA
gtgggatcatgctatt

SEQ ID NO: 1426 - DNA, 16 bp, synthetic construct
  source 1..16: mol_type = other DNA
tctttgcagaccacct

SEQ ID NO: 1427 - DNA, 16 bp, synthetic construct
  source 1..16: mol_type = other DNA
ttacccccgccatgga

SEQ ID NO: 1428 - DNA, 16 bp, synthetic construct
  source 1..16: mol_type = other DNA
tcaacaggtaacaacg

SEQ ID NO: 1429 - DNA, 16 bp, synthetic construct
  source 1..16: mol_type = other DNA
gcacactagattattt

SEQ ID NO: 1430 - DNA, 16 bp, synthetic construct
  source 1..16: mol_type = other DNA
cggaagctcctgctgt

SEQ ID NO: 1431 - DNA, 16 bp, synthetic construct
  source 1..16: mol_type = other DNA
tcaagttgtgtgctcc

SEQ ID NO: 1432 - DNA, 16 bp, synthetic construct
  source 1..16: mol_type = other DNA
tcatcgccacacatgg

SEQ ID NO: 1433 - DNA, 16 bp, synthetic construct
  source 1..16: mol_type = other DNA
tcatttccaggagtac

SEQ ID NO: 1434 - DNA, 16 bp, synthetic construct
  source 1..16: mol_type = other DNA
caaatgatcatgtggc

SEQ ID NO: 1435 - DNA, 16 bp, synthetic construct
  source 1..16: mol_type = other DNA
taatgctatcaggtgc

SEQ ID NO: 1436 - DNA, 16 bp, synthetic construct
  source 1..16: mol_type = other DNA
gatatattgggctcaa

SEQ ID NO: 1437 - DNA, 16 bp, synthetic construct
  source 1..16: mol_type = other DNA
gggtttacaaacatgg

SEQ ID NO: 1438 - DNA, 16 bp, synthetic construct
  source 1..16: mol_type = other DNA
ttcattagcatcaccg

SEQ ID NO: 1439 - DNA, 16 bp, synthetic construct
  source 1..16: mol_type = other DNA
gttaatccatgggtca

SEQ ID NO: 1440 - DNA, 16 bp, synthetic construct
  source 1..16: mol_type = other DNA
agcctaaacttcctcc

SEQ ID NO: 1441 - DNA, 16 bp, synthetic construct
  source 1..16: mol_type = other DNA
agaagagccgccctgc

SEQ ID NO: 1442 - DNA, 16 bp, synthetic construct
  source 1..16: mol_type = other DNA
gcaagactagcaagtg

SEQ ID NO: 1443 - DNA, 16 bp, synthetic construct
  source 1..16: mol_type = other DNA
agcatgcggtatgtac

SEQ ID NO: 1444 - DNA, 16 bp, synthetic construct
  source 1..16: mol_type = other DNA
cacacaatttctaggg

SEQ ID NO: 1445 - DNA, 16 bp, synthetic construct
  source 1..16: mol_type = other DNA
ttgacaattagaacca

SEQ ID NO: 1446 - DNA, 16 bp, synthetic construct
  source 1..16: mol_type = other DNA
acaaatccttaccgag

SEQ ID NO: 1447 - DNA, 16 bp, synthetic construct
  source 1..16: mol_type = other DNA
gttttaggtctgggta

SEQ ID NO: 1448 - DNA, 16 bp, synthetic construct
  source 1..16: mol_type = other DNA
ttgcatagccttcttt

SEQ ID NO: 1449 - DNA, 16 bp, synthetic construct
  source 1..16: mol_type = other DNA
catacatacccttctc

SEQ ID NO: 1450 - DNA, 16 bp, synthetic construct
  source 1..16: mol_type = other DNA
cgcagaaactctttaa

SEQ ID NO: 1451 - DNA, 16 bp, synthetic construct
  source 1..16: mol_type = other DNA
gtcttaatgtggattc

SEQ ID NO: 1452 - DNA, 16 bp, synthetic construct
  source 1..16: mol_type = other DNA
agcattggcacactgg

SEQ ID NO: 1453 - DNA, 16 bp, synthetic construct
  source 1..16: mol_type = other DNA
ggctttaaagcaggac

SEQ ID NO: 1454 - DNA, 16 bp, synthetic construct
  source 1..16: mol_type = other DNA
gcagacatgttggtgt

SEQ ID NO: 1455 - DNA, 16 bp, synthetic construct
  source 1..16: mol_type = other DNA
tacaagctggtccttg

SEQ ID NO: 1456 - DNA, 16 bp, synthetic construct
  source 1..16: mol_type = other DNA
gacaatccaggtccca

SEQ ID NO: 1457 - DNA, 16 bp, synthetic construct
  source 1..16: mol_type = other DNA
gaggaagcccaatcaa

SEQ ID NO: 1458 - DNA, 16 bp, synthetic construct
  source 1..16: mol_type = other DNA
ctaattttacgatcat

SEQ ID NO: 1459 - DNA, 16 bp, synthetic construct
  source 1..16: mol_type = other DNA
ttaaactgccaagtcc

SEQ ID NO: 1460 - DNA, 16 bp, synthetic construct
  source 1..16: mol_type = other DNA
ccaatatactgagagg

SEQ ID NO: 1461 - DNA, 16 bp, synthetic construct
  source 1..16: mol_type = other DNA
ggtagcaccgccaagt

SEQ ID NO: 1462 - DNA, 16 bp, synthetic construct
  source 1..16: mol_type = other DNA
caccatggagaggtct

SEQ ID NO: 1463 - DNA, 16 bp, synthetic construct
  source 1..16: mol_type = other DNA
ttgcattaccaggcac

SEQ ID NO: 1464 - DNA, 16 bp, synthetic construct
  source 1..16: mol_type = other DNA
gctacctggacacctc

SEQ ID NO: 1465 - DNA, 16 bp, synthetic construct
  source 1..16: mol_type = other DNA
atctttgcagaccacc

SEQ ID NO: 1466 - DNA, 16 bp, synthetic construct
  source 1..16: mol_type = other DNA
cagtgtctcggccagg

SEQ ID NO: 1467 - DNA, 16 bp, synthetic construct
  source 1..16: mol_type = other DNA
gggtcctgatccgcag

SEQ ID NO: 1468 - DNA, 16 bp, synthetic construct
  source 1..16: mol_type = other DNA
agctccagccgcgctc

SEQ ID NO: 1469 - DNA, 16 bp, synthetic construct
  source 1..16: mol_type = other DNA
tcaggcagcgggtcgc

SEQ ID NO: 1470 - DNA, 16 bp, synthetic construct
  source 1..16: mol_type = other DNA
cagcgggataccggag

SEQ ID NO: 1471 - DNA, 16 bp, synthetic construct
  source 1..16: mol_type = other DNA
cttccgcacaagatct

SEQ ID NO: 1472 - DNA, 16 bp, synthetic construct
  source 1..16: mol_type = other DNA
ggaagatgccaatgtt

SEQ ID NO: 1473 - DNA, 16 bp, synthetic construct
  source 1..16: mol_type = other DNA
accctgtcggaggaac

SEQ ID NO: 1474 - DNA, 16 bp, synthetic construct
  source 1..16: mol_type = other DNA
ggtggacattggccgg

SEQ ID NO: 1475 - DNA, 16 bp, synthetic construct
  source 1..16: mol_type = other DNA
agatgcctattttgcc

SEQ ID NO: 1476 - DNA, 16 bp, synthetic construct
  source 1..16: mol_type = other DNA
cgaaagtcagacacca

SEQ ID NO: 1477 - DNA, 16 bp, synthetic construct
  source 1..16: mol_type = other DNA
tgactttagggcagat

SEQ ID NO: 1478 - DNA, 16 bp, synthetic construct
  source 1..16: mol_type = other DNA
aaggtagaggttccct

SEQ ID NO: 1479 - DNA, 16 bp, synthetic construct
  source 1..16: mol_type = other DNA
aaggcatatctctccc

SEQ ID NO: 1480 - DNA, 16 bp, synthetic construct
  source 1..16: mol_type = other DNA
cctgttgcagatgccc

SEQ ID NO: 1481 - DNA, 16 bp, synthetic construct
  source 1..16: mol_type = other DNA
atggcgacctcaggat

SEQ ID NO: 1482 - DNA, 16 bp, synthetic construct
  source 1..16: mol_type = other DNA
caaggcagccgactcc

SEQ ID NO: 1483 - DNA, 16 bp, synthetic construct
  source 1..16: mol_type = other DNA
cgagagggtgtccagg

SEQ ID NO: 1484 - DNA, 16 bp, synthetic construct
  source 1..16: mol_type = other DNA
cttcactcagtgctgt

SEQ ID NO: 1485 - DNA, 16 bp, synthetic construct
  source 1..16: mol_type = other DNA
cagcattacataagac

SEQ ID NO: 1486 - DNA, 16 bp, synthetic construct
  source 1..16: mol_type = other DNA
ctctggacaatcgcaa

SEQ ID NO: 1487 - DNA, 16 bp, synthetic construct
  source 1..16: mol_type = other DNA
cgagtgaacacctgtg

SEQ ID NO: 1488 - DNA, 16 bp, synthetic construct
  source 1..16: mol_type = other DNA
tgttggctgctcactg

SEQ ID NO: 1489 - DNA, 16 bp, synthetic construct
  source 1..16: mol_type = other DNA
ctggacagcccttggg

SEQ ID NO: 1490 - DNA, 16 bp, synthetic construct
  source 1..16: mol_type = other DNA
tattgcccaagaagaa

SEQ ID NO: 1491 - DNA, 16 bp, synthetic construct
  source 1..16: mol_type = other DNA
actcttctctagtgaa

SEQ ID NO: 1492 - DNA, 16 bp, synthetic construct
  source 1..16: mol_type = other DNA
ctgctagactcgcctc

SEQ ID NO: 1493 - DNA, 16 bp, synthetic construct
  source 1..16: mol_type = other DNA
aatgcggaggtagctg

SEQ ID NO: 1494 - DNA, 16 bp, synthetic construct
  source 1..16: mol_type = other DNA
aggttgcttcctagct

SEQ ID NO: 1495 - DNA, 16 bp, synthetic construct
  source 1..16: mol_type = other DNA
tggaccgctgcacagg

SEQ ID NO: 1496 - DNA, 16 bp, synthetic construct
  source 1..16: mol_type = other DNA
gcatgctgatgtatta

SEQ ID NO: 1497 - DNA, 16 bp, synthetic construct
  source 1..16: mol_type = other DNA
tcatttcccaaccagc

SEQ ID NO: 1498 - DNA, 16 bp, synthetic construct
  source 1..16: mol_type = other DNA
acgaaacagtcagtaa

SEQ ID NO: 1499 - DNA, 16 bp, synthetic construct
  source 1..16: mol_type = other DNA
ggaacagtctgaccat

SEQ ID NO: 1500 - DNA, 16 bp, synthetic construct
  source 1..16: mol_type = other DNA
aacacctgtcattcta

SEQ ID NO: 1501 - DNA, 16 bp, synthetic construct
  source 1..16: mol_type = other DNA
gccagcctacccccca

SEQ ID NO: 1502 - DNA, 16 bp, synthetic construct
  source 1..16: mol_type = other DNA
agtgggatcatgctat

SEQ ID NO: 1503 - DNA, 16 bp, synthetic construct
  source 1..16: mol_type = other DNA
gttacccccgccatgg

SEQ ID NO: 1504 - DNA, 16 bp, synthetic construct
  source 1..16: mol_type = other DNA
ttcaacaggtaacaac

SEQ ID NO: 1505 - DNA, 16 bp, synthetic construct
  source 1..16: mol_type = other DNA
tgcacactagattatt

SEQ ID NO: 1506 - DNA, 16 bp, synthetic construct
  source 1..16: mol_type = other DNA
gcggaagctcctgctg

SEQ ID NO: 1507 - DNA, 16 bp, synthetic construct
  source 1..16: mol_type = other DNA
gttcaagttgtgtgct

SEQ ID NO: 1508 - DNA, 16 bp, synthetic construct
  source 1..16: mol_type = other DNA
ctcatcgccacacatg

SEQ ID NO: 1509 - DNA, 16 bp, synthetic construct
  source 1..16: mol_type = other DNA
cggaatctcatttcca

SEQ ID NO: 1510 - DNA, 16 bp, synthetic construct
  source 1..16: mol_type = other DNA
gcaaatgatcatgtgg

SEQ ID NO: 1511 - DNA, 16 bp, synthetic construct
  source 1..16: mol_type = other DNA
cttaatgctatcaggt

SEQ ID NO: 1512 - DNA, 16 bp, synthetic construct
  source 1..16: mol_type = other DNA
ggatatattgggctca

SEQ ID NO: 1513 - DNA, 16 bp, synthetic construct
  source 1..16: mol_type = other DNA
agggtttacaaacatg

SEQ ID NO: 1514 - DNA, 16 bp, synthetic construct
  source 1..16: mol_type = other DNA
attcattagcatcacc

SEQ ID NO: 1515 - DNA, 16 bp, synthetic construct
  source 1..16: mol_type = other DNA
ggttaatccatgggtc

SEQ ID NO: 1516 - DNA, 16 bp, synthetic construct
  source 1..16: mol_type = other DNA
agttttaggtctgggt

SEQ ID NO: 1517 - DNA, 16 bp, synthetic construct
  source 1..16: mol_type = other DNA
cattgcatagccttct

SEQ ID NO: 1518 - DNA, 16 bp, synthetic construct
  source 1..16: mol_type = other DNA
ccatacatacccttct

SEQ ID NO: 1519 - DNA, 16 bp, synthetic construct
  source 1..16: mol_type = other DNA
acccacacctgactgg

SEQ ID NO: 1520 - DNA, 16 bp, synthetic construct
  source 1..16: mol_type = other DNA
cgctcctacttatccc

SEQ ID NO: 1521 - DNA, 16 bp, synthetic construct
  source 1..16: mol_type = other DNA
tcttacagcattggca

SEQ ID NO: 1522 - DNA, 16 bp, synthetic construct
  source 1..16: mol_type = other DNA
catctaccaaactgca

SEQ ID NO: 1523 - DNA, 16 bp, synthetic construct
  source 1..16: mol_type = other DNA
aacaaacatcgatttt

SEQ ID NO: 1524 - DNA, 16 bp, synthetic construct
  source 1..16: mol_type = other DNA
agctttacaagctggt

SEQ ID NO: 1525 - DNA, 16 bp, synthetic construct
  source 1..16: mol_type = other DNA
acgacaatccaggtcc

SEQ ID NO: 1526 - DNA, 16 bp, synthetic construct
  source 1..16: mol_type = other DNA
tctaattttacgatca

SEQ ID NO: 1527 - DNA, 16 bp, synthetic construct
  source 1..16: mol_type = other DNA
attaaactgccaagtc

SEQ ID NO: 1528 - DNA, 16 bp, synthetic construct
  source 1..16: mol_type = other DNA
accaatatactgagag

SEQ ID NO: 1529 - DNA, 16 bp, synthetic construct
  source 1..16: mol_type = other DNA
agcggtagcaccgcca

SEQ ID NO: 1530 - DNA, 16 bp, synthetic construct
  source 1..16: mol_type = other DNA
tcacatgtgagcccag

SEQ ID NO: 1531 - DNA, 16 bp, synthetic construct
  source 1..16: mol_type = other DNA
gtacaacagagggtgg

SEQ ID NO: 1532 - DNA, 16 bp, synthetic construct
  source 1..16: mol_type = other DNA
ggctgatgtcaccacc

SEQ ID NO: 1533 - DNA, 16 bp, synthetic construct
  source 1..16: mol_type = other DNA
tcagtgtctcggccag

SEQ ID NO: 1534 - DNA, 16 bp, synthetic construct
  source 1..16: mol_type = other DNA
tcggctcgggtcctga

SEQ ID NO: 1535 - DNA, 16 bp, synthetic construct
  source 1..16: mol_type = other DNA
caagctccagccgcgc

SEQ ID NO: 1536 - DNA, 16 bp, synthetic construct
  source 1..16: mol_type = other DNA
ctcaggcagcgggtcg

SEQ ID NO: 1537 - DNA, 16 bp, synthetic construct
  source 1..16: mol_type = other DNA
ccagcgggataccgga

SEQ ID NO: 1538 - DNA, 16 bp, synthetic construct
  source 1..16: mol_type = other DNA
ccttccgcacaagatc

SEQ ID NO: 1539 - DNA, 16 bp, synthetic construct
  source 1..16: mol_type = other DNA
gatggaagatgccaat

SEQ ID NO: 1540 - DNA, 16 bp, synthetic construct
  source 1..16: mol_type = other DNA
gaccctgtcggaggaa

SEQ ID NO: 1541 - DNA, 16 bp, synthetic construct
  source 1..16: mol_type = other DNA
ctggtggacattggcc

SEQ ID NO: 1542 - DNA, 16 bp, synthetic construct
  source 1..16: mol_type = other DNA
gagatgcctattttgc

SEQ ID NO: 1543 - DNA, 16 bp, synthetic construct
  source 1..16: mol_type = other DNA
ccgaaagtcagacacc

SEQ ID NO: 1544 - DNA, 16 bp, synthetic construct
  source 1..16: mol_type = other DNA
gcatcaatgaagggta

SEQ ID NO: 1545 - DNA, 16 bp, synthetic construct
  source 1..16: mol_type = other DNA
ttgactttagggcaga

SEQ ID NO: 1546 - DNA, 16 bp, synthetic construct
  source 1..16: mol_type = other DNA
gaaggtagaggttccc

SEQ ID NO: 1547 - DNA, 16 bp, synthetic construct
  source 1..16: mol_type = other DNA
gaaggcatatctctcc

SEQ ID NO: 1548 - DNA, 16 bp, synthetic construct
  source 1..16: mol_type = other DNA
gcctgttgcagatgcc

SEQ ID NO: 1549 - DNA, 16 bp, synthetic construct
  source 1..16: mol_type = other DNA
catggcgacctcagga

SEQ ID NO: 1550 - DNA, 16 bp, synthetic construct
  source 1..16: mol_type = other DNA
ccaaggcagccgactc

SEQ ID NO: 1551 - DNA, 16 bp, synthetic construct
  source 1..16: mol_type = other DNA
gcgagagggtgtccag

SEQ ID NO: 1552 - DNA, 16 bp, synthetic construct
  source 1..16: mol_type = other DNA
tcttcactcagtgctg

SEQ ID NO: 1553 - DNA, 16 bp, synthetic construct
  source 1..16: mol_type = other DNA
gcagcattacataaga

SEQ ID NO: 1554 - DNA, 16 bp, synthetic construct
  source 1..16: mol_type = other DNA
agtctctggacaatcg

SEQ ID NO: 1555 - DNA, 16 bp, synthetic construct
  source 1..16: mol_type = other DNA
tcgagtgaacacctgt

SEQ ID NO: 1556 - DNA, 16 bp, synthetic construct
  source 1..16: mol_type = other DNA
ctgttggctgctcact

SEQ ID NO: 1557 - DNA, 16 bp, synthetic construct
  source 1..16: mol_type = other DNA
gctggacagcccttgg

SEQ ID NO: 1558 - DNA, 16 bp, synthetic construct
  source 1..16: mol_type = other DNA
ttattgcccaagaaga

SEQ ID NO: 1559 - DNA, 16 bp, synthetic construct
  source 1..16: mol_type = other DNA
gactcttctctagtga

SEQ ID NO: 1560 - DNA, 16 bp, synthetic construct
  source 1..16: mol_type = other DNA
tctgctagactcgcct

SEQ ID NO: 1561 - DNA, 16 bp, synthetic construct
  source 1..16: mol_type = other DNA
caatgcggaggtagct

SEQ ID NO: 1562 - DNA, 16 bp, synthetic construct
  source 1..16: mol_type = other DNA
aaggttgcttcctagc

SEQ ID NO: 1563 - DNA, 16 bp, synthetic construct
  source 1..16: mol_type = other DNA
ctggaccgctgcacag

SEQ ID NO: 1564 - DNA, 16 bp, synthetic construct
  source 1..16: mol_type = other DNA
cgcatgctgatgtatt

SEQ ID NO: 1565 - DNA, 16 bp, synthetic construct
  source 1..16: mol_type = other DNA
gtgtcatttcccaacc

SEQ ID NO: 1566 - DNA, 16 bp, synthetic construct
  source 1..16: mol_type = other DNA
cacgaaacagtcagta

SEQ ID NO: 1567 - DNA, 16 bp, synthetic construct
  source 1..16: mol_type = other DNA
gctggaacagtctgac

SEQ ID NO: 1568 - DNA, 16 bp, synthetic construct
  source 1..16: mol_type = other DNA
catccaaacacctgtc

SEQ ID NO: 1569 - DNA, 16 bp, synthetic construct
  source 1..16: mol_type = other DNA
ggccagcctacccccc

SEQ ID NO: 1570 - DNA, 16 bp, synthetic construct
  source 1..16: mol_type = other DNA
aagtgggatcatgcta

SEQ ID NO: 1571 - DNA, 16 bp, synthetic construct
  source 1..16: mol_type = other DNA
catctttgcagaccac

SEQ ID NO: 1572 - DNA, 16 bp, synthetic construct
  source 1..16: mol_type = other DNA
tgttacccccgccatg

SEQ ID NO: 1573 - DNA, 16 bp, synthetic construct
  source 1..16: mol_type = other DNA
gattcacataatacaa

SEQ ID NO: 1574 - DNA, 16 bp, synthetic construct
  source 1..16: mol_type = other DNA
ctgcacactagattat

SEQ ID NO: 1575 - DNA, 16 bp, synthetic construct
  source 1..16: mol_type = other DNA
ggcggaagctcctgct

SEQ ID NO: 1576 - DNA, 16 bp, synthetic construct
  source 1..16: mol_type = other DNA
ggttcaagttgtgtgc

SEQ ID NO: 1577 - DNA, 16 bp, synthetic construct
  source 1..16: mol_type = other DNA
tctcatcgccacacat

SEQ ID NO: 1578 - DNA, 16 bp, synthetic construct
  source 1..16: mol_type = other DNA
tacggaatctcatttc

SEQ ID NO: 1579 - DNA, 16 bp, synthetic construct
  source 1..16: mol_type = other DNA
ggccaccttgggatac

SEQ ID NO: 1580 - DNA, 16 bp, synthetic construct
  source 1..16: mol_type = other DNA
gccttaatgctatcag

SEQ ID NO: 1581 - DNA, 16 bp, synthetic construct
  source 1..16: mol_type = other DNA
tggatatattgggctc

SEQ ID NO: 1582 - DNA, 16 bp, synthetic construct
  source 1..16: mol_type = other DNA
acattcagggtttaca

SEQ ID NO: 1583 - DNA, 16 bp, synthetic construct
  source 1..16: mol_type = other DNA
gtattcattagcatca

SEQ ID NO: 1584 - DNA, 16 bp, synthetic construct
  source 1..16: mol_type = other DNA
aggttaatccatgggt

SEQ ID NO: 1585 - DNA, 16 bp, synthetic construct
  source 1..16: mol_type = other DNA
gagttttaggtctggg

SEQ ID NO: 1586 - DNA, 16 bp, synthetic construct
  source 1..16: mol_type = other DNA
cttataaagcacacgg

SEQ ID NO: 1587 - DNA, 16 bp, synthetic construct
  source 1..16: mol_type = other DNA
gggcatggctgatcct

SEQ ID NO: 1588 - DNA, 16 bp, synthetic construct
  source 1..16: mol_type = other DNA
caaacttgtctagtgg

SEQ ID NO: 1589 - DNA, 16 bp, synthetic construct
  source 1..16: mol_type = other DNA
tcgcatccatgggtcc

SEQ ID NO: 1590 - DNA, 16 bp, synthetic construct
  source 1..16: mol_type = other DNA
gctcttacagcattgg

SEQ ID NO: 1591 - DNA, 16 bp, synthetic construct
  source 1..16: mol_type = other DNA
ccatctaccaaactgc

SEQ ID NO: 1592 - DNA, 16 bp, synthetic construct
  source 1..16: mol_type = other DNA
gacttagtccgtgttc

SEQ ID NO: 1593 - DNA, 16 bp, synthetic construct
  source 1..16: mol_type = other DNA
cagcatctatgttctc

SEQ ID NO: 1594 - DNA, 16 bp, synthetic construct
  source 1..16: mol_type = other DNA
atagactgtgagctgt

SEQ ID NO: 1595 - DNA, 16 bp, synthetic construct
  source 1..16: mol_type = other DNA
gaccattctgctcccc

SEQ ID NO: 1596 - DNA, 16 bp, synthetic construct
  source 1..16: mol_type = other DNA
gcccataccttttatc

SEQ ID NO: 1597 - DNA, 16 bp, synthetic construct
  source 1..16: mol_type = other DNA
gtattaaactgccaag

SEQ ID NO: 1598 - DNA, 16 bp, synthetic construct
  source 1..16: mol_type = other DNA
ctaaccaatatactga

SEQ ID NO: 1599 - DNA, 16 bp, synthetic construct
  source 1..16: mol_type = other DNA
ggctggtgatgaaaca

SEQ ID NO: 1600 - DNA, 16 bp, synthetic construct
  source 1..16: mol_type = other DNA
cctcatggtttgctgt

SEQ ID NO: 1601 - DNA, 16 bp, synthetic construct
  source 1..16: mol_type = other DNA
cagtacaacagagggt

SEQ ID NO: 1602 - DNA, 16 bp, synthetic construct
  source 1..16: mol_type = other DNA
cacattgccggccagt

SEQ ID NO: 1603 - DNA, 16 bp, synthetic construct
  source 1..16: mol_type = other DNA
ctcagtgtctcggcca

SEQ ID NO: 1604 - DNA, 16 bp, synthetic construct
  source 1..16: mol_type = other DNA
atcggctcgggtcctg

SEQ ID NO: 1605 - DNA, 16 bp, synthetic construct
  source 1..16: mol_type = other DNA
acaagctccagccgcg

SEQ ID NO: 1606 - DNA, 16 bp, synthetic construct
  source 1..16: mol_type = other DNA
gctcaggcagcgggtc

SEQ ID NO: 1607 - DNA, 16 bp, synthetic construct
  source 1..16: mol_type = other DNA
tccagcgggataccgg

SEQ ID NO: 1608 - DNA, 16 bp, synthetic construct
  source 1..16: mol_type = other DNA
gccttccgcacaagat

SEQ ID NO: 1609 - DNA, 16 bp, synthetic construct
  source 1..16: mol_type = other DNA
ggatggaagatgccaa

SEQ ID NO: 1610 - DNA, 16 bp, synthetic construct
  source 1..16: mol_type = other DNA
agaccctgtcggagga

SEQ ID NO: 1611 - DNA, 16 bp, synthetic construct
  source 1..16: mol_type = other DNA
atgagctggtggacat

SEQ ID NO: 1612 - DNA, 16 bp, synthetic construct
  source 1..16: mol_type = other DNA
agagatgcctattttg

SEQ ID NO: 1613 - DNA, 16 bp, synthetic construct
  source 1..16: mol_type = other DNA
accgaaagtcagacac

SEQ ID NO: 1614 - DNA, 16 bp, synthetic construct
  source 1..16: mol_type = other DNA
ggcatcaatgaagggt

SEQ ID NO: 1615 - DNA, 16 bp, synthetic construct
  source 1..16: mol_type = other DNA
cttgactttagggcag

SEQ ID NO: 1616 - DNA, 16 bp, synthetic construct
  source 1..16: mol_type = other DNA
gagaaggtagaggttc

SEQ ID NO: 1617 - DNA, 16 bp, synthetic construct
  source 1..16: mol_type = other DNA
tcgaaggcatatctct

SEQ ID NO: 1618 - DNA, 16 bp, synthetic construct
  source 1..16: mol_type = other DNA
ggcctgttgcagatgc

SEQ ID NO: 1619 - DNA, 16 bp, synthetic construct
  source 1..16: mol_type = other DNA
gcatggcgacctcagg

SEQ ID NO: 1620 - DNA, 16 bp, synthetic construct
  source 1..16: mol_type = other DNA
gccaaggcagccgact

SEQ ID NO: 1621 - DNA, 16 bp, synthetic construct
  source 1..16: mol_type = other DNA
ggcgagagggtgtcca

SEQ ID NO: 1622 - DNA, 16 bp, synthetic construct
  source 1..16: mol_type = other DNA
tgtatccacctttgtc

SEQ ID NO: 1623 - DNA, 16 bp, synthetic construct
  source 1..16: mol_type = other DNA
ggcagcattacataag

SEQ ID NO: 1624 - DNA, 16 bp, synthetic construct
  source 1..16: mol_type = other DNA
ccatgtcaccagtctc

SEQ ID NO: 1625 - DNA, 16 bp, synthetic construct
  source 1..16: mol_type = other DNA
ctcgagtgaacacctg

SEQ ID NO: 1626 - DNA, 16 bp, synthetic construct
  source 1..16: mol_type = other DNA
cctgttggctgctcac

SEQ ID NO: 1627 - DNA, 16 bp, synthetic construct
  source 1..16: mol_type = other DNA
tgctggacagcccttg

SEQ ID NO: 1628 - DNA, 16 bp, synthetic construct
  source 1..16: mol_type = other DNA
tttattgcccaagaag

SEQ ID NO: 1629 - DNA, 16 bp, synthetic construct
  source 1..16: mol_type = other DNA
agactcttctctagtg

SEQ ID NO: 1630 - DNA, 16 bp, synthetic construct
  source 1..16: mol_type = other DNA
atctgctagactcgcc

SEQ ID NO: 1631 - DNA, 16 bp, synthetic construct
  source 1..16: mol_type = other DNA
gcaatgcggaggtagc

SEQ ID NO: 1632 - DNA, 16 bp, synthetic construct
  source 1..16: mol_type = other DNA
aaaggttgcttcctag

SEQ ID NO: 1633 - DNA, 16 bp, synthetic construct
  source 1..16: mol_type = other DNA
gctggaccgctgcaca

SEQ ID NO: 1634 - DNA, 16 bp, synthetic construct
  source 1..16: mol_type = other DNA
acgcatgctgatgtat

SEQ ID NO: 1635 - DNA, 16 bp, synthetic construct
  source 1..16: mol_type = other DNA
ggtgtcatttcccaac

SEQ ID NO: 1636 - DNA, 16 bp, synthetic construct
  source 1..16: mol_type = other DNA
ccacgaaacagtcagt

SEQ ID NO: 1637 - DNA, 16 bp, synthetic construct
  source 1..16: mol_type = other DNA
atgctggaacagtctg

SEQ ID NO: 1638 - DNA, 16 bp, synthetic construct
  source 1..16: mol_type = other DNA
ccatccaaacacctgt

SEQ ID NO: 1639 - DNA, 16 bp, synthetic construct
  source 1..16: mol_type = other DNA
gggccagcctaccccc

SEQ ID NO: 1640 - DNA, 16 bp, synthetic construct
  source 1..16: mol_type = other DNA
gaagtgggatcatgct

SEQ ID NO: 1641 - DNA, 16 bp, synthetic construct
  source 1..16: mol_type = other DNA
atcatctttgcagacc

SEQ ID NO: 1642 - DNA, 16 bp, synthetic construct
  source 1..16: mol_type = other DNA
ttgttacccccgccat

SEQ ID NO: 1643 - DNA, 16 bp, synthetic construct
  source 1..16: mol_type = other DNA
ctgattcacataatac

SEQ ID NO: 1644 - DNA, 16 bp, synthetic construct
  source 1..16: mol_type = other DNA
cctgcacactagatta

SEQ ID NO: 1645 - DNA, 16 bp, synthetic construct
  source 1..16: mol_type = other DNA
aggcggaagctcctgc

SEQ ID NO: 1646 - DNA, 16 bp, synthetic construct
  source 1..16: mol_type = other DNA
aggttcaagttgtgtg

SEQ ID NO: 1647 - DNA, 16 bp, synthetic construct
  source 1..16: mol_type = other DNA
aatgtacggaatctca

SEQ ID NO: 1648 - DNA, 16 bp, synthetic construct
  source 1..16: mol_type = other DNA
gtccatgtgggtgtcc

SEQ ID NO: 1649 - DNA, 16 bp, synthetic construct
  source 1..16: mol_type = other DNA
ggccttaatgctatca

SEQ ID NO: 1650 - DNA, 16 bp, synthetic construct
  source 1..16: mol_type = other DNA
tagtatgaaatatctc

SEQ ID NO: 1651 - DNA, 16 bp, synthetic construct
  source 1..16: mol_type = other DNA
attgtaactgccaggc

SEQ ID NO: 1652 - DNA, 16 bp, synthetic construct
  source 1..16: mol_type = other DNA
ccggtattcattagca

SEQ ID NO: 1653 - DNA, 16 bp, synthetic construct
  source 1..16: mol_type = other DNA
gagcagggcaacaaac

SEQ ID NO: 1654 - DNA, 16 bp, synthetic construct
  source 1..16: mol_type = other DNA
atataaccacagcctg

SEQ ID NO: 1655 - DNA, 16 bp, synthetic construct
  source 1..16: mol_type = other DNA
gcttataaagcacacg

SEQ ID NO: 1656 - DNA, 16 bp, synthetic construct
  source 1..16: mol_type = other DNA
tagtaaatgcttgtca

SEQ ID NO: 1657 - DNA, 16 bp, synthetic construct
  source 1..16: mol_type = other DNA
ggcagaaatgtgctct

SEQ ID NO: 1658 - DNA, 16 bp, synthetic construct
  source 1..16: mol_type = other DNA
cttcatgccatcctgt

SEQ ID NO: 1659 - DNA, 16 bp, synthetic construct
  source 1..16: mol_type = other DNA
tgctcttacagcattg

SEQ ID NO: 1660 - DNA, 16 bp, synthetic construct
  source 1..16: mol_type = other DNA
ggtacctgtagcgagc

SEQ ID NO: 1661 - DNA, 16 bp, synthetic construct
  source 1..16: mol_type = other DNA
ttgacttagtccgtgt

SEQ ID NO: 1662 - DNA, 16 bp, synthetic construct
  source 1..16: mol_type = other DNA
agctacatcaggctgg

SEQ ID NO: 1663 - DNA, 16 bp, synthetic construct
  source 1..16: mol_type = other DNA
tgcacatagactgtga

SEQ ID NO: 1664 - DNA, 16 bp, synthetic construct
  source 1..16: mol_type = other DNA
gactgctgagccaagc

SEQ ID NO: 1665 - DNA, 16 bp, synthetic construct
  source 1..16: mol_type = other DNA
agaaattgcagtgccc

SEQ ID NO: 1666 - DNA, 16 bp, synthetic construct
  source 1..16: mol_type = other DNA
ggtattaaactgccaa

SEQ ID NO: 1667 - DNA, 16 bp, synthetic construct
  source 1..16: mol_type = other DNA
tcactaaccaatatac

SEQ ID NO: 1668 - DNA, 16 bp, synthetic construct
  source 1..16: mol_type = other DNA
ataaatctgcaagagc

SEQ ID NO: 1669 - DNA, 16 bp, synthetic construct
  source 1..16: mol_type = other DNA
tctcatggtcaagacc

SEQ ID NO: 1670 - DNA, 16 bp, synthetic construct
  source 1..16: mol_type = other DNA
gactgctaggcttcac

SEQ ID NO: 1671 - DNA, 16 bp, synthetic construct
  source 1..16: mol_type = other DNA
cgctgctgcagtgtgc

SEQ ID NO: 1672 - DNA, 16 bp, synthetic construct
  source 1..16: mol_type = other DNA
ggcatccacgacttcg

SEQ ID NO: 1673 - DNA, 16 bp, synthetic construct
  source 1..16: mol_type = other DNA
aggcatccacgacttc

SEQ ID NO: 1674 - DNA, 16 bp, synthetic construct
  source 1..16: mol_type = other DNA
caaggcatccacgact

SEQ ID NO: 1675 - DNA, 16 bp, synthetic construct
  source 1..16: mol_type = other DNA
aacataccaaggcatc

SEQ ID NO: 1676 - DNA, 16 bp, synthetic construct
  source 1..16: mol_type = other DNA
ggaacataccaaggca

SEQ ID NO: 1677 - DNA, 16 bp, synthetic construct
  source 1..16: mol_type = other DNA
aggaacataccaaggc

SEQ ID NO: 1678 - DNA, 16 bp, synthetic construct
  source 1..16: mol_type = other DNA
gggataaggccactgt

SEQ ID NO: 1679 - DNA, 16 bp, synthetic construct
  source 1..16: mol_type = other DNA
agggataaggccactg

SEQ ID NO: 1680 - DNA, 16 bp, synthetic construct
  source 1..16: mol_type = other DNA
aaggagggataaggcc

SEQ ID NO: 1681 - DNA, 16 bp, synthetic construct
  source 1..16: mol_type = other DNA
acatatcgcacgcctc

SEQ ID NO: 1682 - DNA, 16 bp, synthetic construct
  source 1..16: mol_type = other DNA
cacatatcgcacgcct

SEQ ID NO: 1683 - DNA, 16 bp, synthetic construct
  source 1..16: mol_type = other DNA
ccacatatcgcacgcc

SEQ ID NO: 1684 - DNA, 16 bp, synthetic construct
  source 1..16: mol_type = other DNA
atccacatatcgcacg

SEQ ID NO: 1685 - DNA, 16 bp, synthetic construct
  source 1..16: mol_type = other DNA
ctccatccacatatcg

SEQ ID NO: 1686 - DNA, 16 bp, synthetic construct
  source 1..16: mol_type = other DNA
atcaatgaagggtacg

SEQ ID NO: 1687 - DNA, 16 bp, synthetic construct
  source 1..16: mol_type = other DNA
catcaatgaagggtac

SEQ ID NO: 1688 - DNA, 16 bp, synthetic construct
  source 1..16: mol_type = other DNA
atggaagatgccaatg

SEQ ID NO: 1689 - DNA, 16 bp, synthetic construct
  source 1..16: mol_type = other DNA
ggagatgagctggtgg

SEQ ID NO: 1690 - DNA, 16 bp, synthetic construct
  source 1..16: mol_type = other DNA
agactgagcttggtga

SEQ ID NO: 1691 - DNA, 16 bp, synthetic construct
  source 1..16: mol_type = other DNA
cctgaatgcatccaaa

SEQ ID NO: 1692 - DNA, 16 bp, synthetic construct
  source 1..16: mol_type = other DNA
atgctgagacgcaggt

SEQ ID NO: 1693 - DNA, 16 bp, synthetic construct
  source 1..16: mol_type = other DNA
aatggcagattccaca

SEQ ID NO: 1694 - DNA, 16 bp, synthetic construct
  source 1..16: mol_type = other DNA
ctctgaaagaatctgc

SEQ ID NO: 1695 - DNA, 16 bp, synthetic construct
  source 1..16: mol_type = other DNA
atgggaaactttagca

SEQ ID NO: 1696 - DNA, 16 bp, synthetic construct
  source 1..16: mol_type = other DNA
tgtcatttcccaacca

SEQ ID NO: 1697 - DNA, 16 bp, synthetic construct
  source 1..16: mol_type = other DNA
ttttagtagtcaaggt

SEQ ID NO: 1698 - DNA, 16 bp, synthetic construct
  source 1..16: mol_type = other DNA
gcttccttacattttt

SEQ ID NO: 1699 - DNA, 16 bp, synthetic construct
  source 1..16: mol_type = other DNA
taacatctcactgatt

SEQ ID NO: 1700 - DNA, 16 bp, synthetic construct
  source 1..16: mol_type = other DNA
ctagtgagaaacaaac

SEQ ID NO: 1701 - DNA, 16 bp, synthetic construct
  source 1..16: mol_type = other DNA
ttattgttgctaaacc

SEQ ID NO: 1702 - DNA, 16 bp, synthetic construct
  source 1..16: mol_type = other DNA
actttaggctcctggg

SEQ ID NO: 1703 - DNA, 16 bp, synthetic construct
  source 1..16: mol_type = other DNA
agccataaatcttggg

SEQ ID NO: 1704 - DNA, 16 bp, synthetic construct
  source 1..16: mol_type = other DNA
atgacatcatggcttc

SEQ ID NO: 1705 - DNA, 16 bp, synthetic construct
  source 1..16: mol_type = other DNA
ttattcaatgtggctt

SEQ ID NO: 1706 - DNA, 16 bp, synthetic construct
  source 1..16: mol_type = other DNA
gggctcaatgaaatta

SEQ ID NO: 1707 - DNA, 16 bp, synthetic construct
  source 1..16: mol_type = other DNA
cttagtatgaaatatc

SEQ ID NO: 1708 - DNA, 16 bp, synthetic construct
  source 1..16: mol_type = other DNA
tactgtctactatggg

SEQ ID NO: 1709 - DNA, 16 bp, synthetic construct
  source 1..16: mol_type = other DNA
cttacatccacgactt

SEQ ID NO: 1710 - DNA, 16 bp, synthetic construct
  source 1..16: mol_type = other DNA
cagtaactggtagctc

SEQ ID NO: 1711 - DNA, 16 bp, synthetic construct
  source 1..16: mol_type = other DNA
tgtttgattgtgcaga

SEQ ID NO: 1712 - DNA, 16 bp, synthetic construct
  source 1..16: mol_type = other DNA
cgccttttatttccgt

SEQ ID NO: 1713 - DNA, 16 bp, synthetic construct
  source 1..16: mol_type = other DNA
ataaccacagcctggg

SEQ ID NO: 1714 - DNA, 16 bp, synthetic construct
  source 1..16: mol_type = other DNA
ataagaatcatcttag

SEQ ID NO: 1715 - DNA, 16 bp, synthetic construct
  source 1..16: mol_type = other DNA
actaccgaacgcagtt

SEQ ID NO: 1716 - DNA, 16 bp, synthetic construct
  source 1..16: mol_type = other DNA
tagagtggtaaggcat

SEQ ID NO: 1717 - DNA, 16 bp, synthetic construct
  source 1..16: mol_type = other DNA
ggttggtgtacatggt

SEQ ID NO: 1718 - DNA, 16 bp, synthetic construct
  source 1..16: mol_type = other DNA
tcctgttagacagctt

SEQ ID NO: 1719 - DNA, 16 bp, synthetic construct
  source 1..16: mol_type = other DNA
ataaagcacacgggaa

SEQ ID NO: 1720 - DNA, 16 bp, synthetic construct
  source 1..16: mol_type = other DNA
taagagctgtctcctc

SEQ ID NO: 1721 - DNA, 16 bp, synthetic construct
  source 1..16: mol_type = other DNA
ctaacaaactttgcag

SEQ ID NO: 1722 - DNA, 16 bp, synthetic construct
  source 1..16: mol_type = other DNA
tgtcacccttccacgg

SEQ ID NO: 1723 - DNA, 16 bp, synthetic construct
  source 1..16: mol_type = other DNA
attggaagaccgcaga

SEQ ID NO: 1724 - DNA, 16 bp, synthetic construct
  source 1..16: mol_type = other DNA
ccgctagtaaatgctt

SEQ ID NO: 1725 - DNA, 16 bp, synthetic construct
  source 1..16: mol_type = other DNA
aactaaggcaaatctc

SEQ ID NO: 1726 - DNA, 16 bp, synthetic construct
  source 1..16: mol_type = other DNA
gagtcatgacatccca

SEQ ID NO: 1727 - DNA, 16 bp, synthetic construct
  source 1..16: mol_type = other DNA
gcagataaatacacat

SEQ ID NO: 1728 - DNA, 16 bp, synthetic construct
  source 1..16: mol_type = other DNA
tttcccatcgacacag

SEQ ID NO: 1729 - DNA, 16 bp, synthetic construct
  source 1..16: mol_type = other DNA
gctcctacttatcccc

SEQ ID NO: 1730 - DNA, 16 bp, synthetic construct
  source 1..16: mol_type = other DNA
tattgccaggtatctg

SEQ ID NO: 1731 - DNA, 16 bp, synthetic construct
  source 1..16: mol_type = other DNA
caatacatagcagagc

SEQ ID NO: 1732 - DNA, 16 bp, synthetic construct
  source 1..16: mol_type = other DNA
ttagtccgtgttcagg

SEQ ID NO: 1733 - DNA, 16 bp, synthetic construct
  source 1..16: mol_type = other DNA
gtagctggtttgtggg

SEQ ID NO: 1734 - DNA, 16 bp, synthetic construct
  source 1..16: mol_type = other DNA
catctcttagggcacc

SEQ ID NO: 1735 - DNA, 16 bp, synthetic construct
  source 1..16: mol_type = other DNA
gtttggaagtcgccat

SEQ ID NO: 1736 - DNA, 16 bp, synthetic construct
  source 1..16: mol_type = other DNA
aggaagcccaatcaag

SEQ ID NO: 1737 - DNA, 16 bp, synthetic construct
  source 1..16: mol_type = other DNA
cagattgagtctcctg

SEQ ID NO: 1738 - DNA, 16 bp, synthetic construct
  source 1..16: mol_type = other DNA
ttttacgatcatcatt

SEQ ID NO: 1739 - DNA, 16 bp, synthetic construct
  source 1..16: mol_type = other DNA
gcttagaaattgcagt

SEQ ID NO: 1740 - DNA, 16 bp, synthetic construct
  source 1..16: mol_type = other DNA
agggtaatattcagac

SEQ ID NO: 1741 - DNA, 16 bp, synthetic construct
  source 1..16: mol_type = other DNA
tgtagcagacagatca

SEQ ID NO: 1742 - DNA, 16 bp, synthetic construct
  source 1..16: mol_type = other DNA
tttaacagctcaggta

SEQ ID NO: 1743 - DNA, 16 bp, synthetic construct
  source 1..16: mol_type = other DNA
attctagacatggcca

SEQ ID NO: 1744 - DNA, 16 bp, synthetic construct
  source 1..16: mol_type = other DNA
aaccaatatactgaga

SEQ ID NO: 1745 - DNA, 16 bp, synthetic construct
  source 1..16: mol_type = other DNA
agacatatgacatttc

SEQ ID NO: 1746 - DNA, 16 bp, synthetic construct
  source 1..16: mol_type = other DNA
acatgacagactaact

SEQ ID NO: 1747 - DNA, 16 bp, synthetic construct
  source 1..16: mol_type = other DNA
catcaatgctgcactc

SEQ ID NO: 1748 - DNA, 16 bp, synthetic construct
  source 1..16: mol_type = other DNA
gttgaaggatggatgg

SEQ ID NO: 1749 - DNA, 16 bp, synthetic construct
  source 1..16: mol_type = other DNA
agagagatgcctattt

SEQ ID NO: 1750 - DNA, 16 bp, synthetic construct
  source 1..16: mol_type = other DNA
ggttccctgtgcagag

SEQ ID NO: 1751 - DNA, 16 bp, synthetic construct
  source 1..16: mol_type = other DNA
aagaacctgaatgcat

SEQ ID NO: 1752 - DNA, 16 bp, synthetic construct
  source 1..16: mol_type = other DNA
gatgctgagacgcagg

SEQ ID NO: 1753 - DNA, 16 bp, synthetic construct
  source 1..16: mol_type = other DNA
acagactcttctctag

SEQ ID NO: 1754 - DNA, 16 bp, synthetic construct
  source 1..16: mol_type = other DNA
cctctgaaagaatctg

SEQ ID NO: 1755 - DNA, 16 bp, synthetic construct
  source 1..16: mol_type = other DNA
gtagctgcacaaagat

SEQ ID NO: 1756 - DNA, 16 bp, synthetic construct
  source 1..16: mol_type = other DNA
tggtgtcatttcccaa

SEQ ID NO: 1757 - DNA, 16 bp, synthetic construct
  source 1..16: mol_type = other DNA
tttttagtagtcaagg

SEQ ID NO: 1758 - DNA, 16 bp, synthetic construct
  source 1..16: mol_type = other DNA
attcaacaggtaacaa

SEQ ID NO: 1759 - DNA, 16 bp, synthetic construct
  source 1..16: mol_type = other DNA
actaacatctcactga

SEQ ID NO: 1760 - DNA, 16 bp, synthetic construct
  source 1..16: mol_type = other DNA
agctagtgagaaacaa

SEQ ID NO: 1761 - DNA, 16 bp, synthetic construct
  source 1..16: mol_type = other DNA
cttttattgttgctaa

SEQ ID NO: 1762 - DNA, 16 bp, synthetic construct
  source 1..16: mol_type = other DNA
agtgtactttaggctc

SEQ ID NO: 1763 - DNA, 16 bp, synthetic construct
  source 1..16: mol_type = other DNA
cagccataaatcttgg

SEQ ID NO: 1764 - DNA, 16 bp, synthetic construct
  source 1..16: mol_type = other DNA
aatgacatcatggctt

SEQ ID NO: 1765 - DNA, 16 bp, synthetic construct
  source 1..16: mol_type = other DNA
tttattcaatgtggct

SEQ ID NO: 1766 - DNA, 16 bp, synthetic construct
  source 1..16: mol_type = other DNA
ttgggctcaatgaaat

SEQ ID NO: 1767 - DNA, 16 bp, synthetic construct
  source 1..16: mol_type = other DNA
gcttagtatgaaatat

SEQ ID NO: 1768 - DNA, 16 bp, synthetic construct
  source 1..16: mol_type = other DNA
gtactgtctactatgg

SEQ ID NO: 1769 - DNA, 16 bp, synthetic construct
  source 1..16: mol_type = other DNA
ctgcttacatccacga

SEQ ID NO: 1770 - DNA, 16 bp, synthetic construct
  source 1..16: mol_type = other DNA
acagtaactggtagct

SEQ ID NO: 1771 - DNA, 16 bp, synthetic construct
  source 1..16: mol_type = other DNA
ctgtttgattgtgcag

SEQ ID NO: 1772 - DNA, 16 bp, synthetic construct
  source 1..16: mol_type = other DNA
gcgccttttatttccg

SEQ ID NO: 1773 - DNA, 16 bp, synthetic construct
  source 1..16: mol_type = other DNA
cctgactatataacca

SEQ ID NO: 1774 - DNA, 16 bp, synthetic construct
  source 1..16: mol_type = other DNA
gaccgtgtttccaaat

SEQ ID NO: 1775 - DNA, 16 bp, synthetic construct
  source 1..16: mol_type = other DNA
aactaccgaacgcagt

SEQ ID NO: 1776 - DNA, 16 bp, synthetic construct
  source 1..16: mol_type = other DNA
ggtagagtggtaaggc

SEQ ID NO: 1777 - DNA, 16 bp, synthetic construct
  source 1..16: mol_type = other DNA
catagccttctttctt

SEQ ID NO: 1778 - DNA, 16 bp, synthetic construct
  source 1..16: mol_type = other DNA
aatcctgttagacagc

SEQ ID NO: 1779 - DNA, 16 bp, synthetic construct
  source 1..16: mol_type = other DNA
tataaagcacacggga

SEQ ID NO: 1780 - DNA, 16 bp, synthetic construct
  source 1..16: mol_type = other DNA
aataagagctgtctcc

SEQ ID NO: 1781 - DNA, 16 bp, synthetic construct
  source 1..16: mol_type = other DNA
ccctaacaaactttgc

SEQ ID NO: 1782 - DNA, 16 bp, synthetic construct
  source 1..16: mol_type = other DNA
aatgtcacccttccac

SEQ ID NO: 1783 - DNA, 16 bp, synthetic construct
  source 1..16: mol_type = other DNA
cattggaagaccgcag

SEQ ID NO: 1784 - DNA, 16 bp, synthetic construct
  source 1..16: mol_type = other DNA
accgctagtaaatgct

SEQ ID NO: 1785 - DNA, 16 bp, synthetic construct
  source 1..16: mol_type = other DNA
tagaactaaggcaaat

SEQ ID NO: 1786 - DNA, 16 bp, synthetic construct
  source 1..16: mol_type = other DNA
ggagtcatgacatccc

SEQ ID NO: 1787 - DNA, 16 bp, synthetic construct
  source 1..16: mol_type = other DNA
tgagcagataaataca

SEQ ID NO: 1788 - DNA, 16 bp, synthetic construct
  source 1..16: mol_type = other DNA
ctttcccatcgacaca

SEQ ID NO: 1789 - DNA, 16 bp, synthetic construct
  source 1..16: mol_type = other DNA
gcgctcctacttatcc

SEQ ID NO: 1790 - DNA, 16 bp, synthetic construct
  source 1..16: mol_type = other DNA
atattgccaggtatct

SEQ ID NO: 1791 - DNA, 16 bp, synthetic construct
  source 1..16: mol_type = other DNA
gtgttggtttataaca

SEQ ID NO: 1792 - DNA, 16 bp, synthetic construct
  source 1..16: mol_type = other DNA
acttagtccgtgttca

SEQ ID NO: 1793 - DNA, 16 bp, synthetic construct
  source 1..16: mol_type = other DNA
ctgtagctggtttgtg

SEQ ID NO: 1794 - DNA, 16 bp, synthetic construct
  source 1..16: mol_type = other DNA
ccatctcttagggcac

SEQ ID NO: 1795 - DNA, 16 bp, synthetic construct
  source 1..16: mol_type = other DNA
tgtttggaagtcgcca

SEQ ID NO: 1796 - DNA, 16 bp, synthetic construct
  source 1..16: mol_type = other DNA
atcagaggaagcccaa

SEQ ID NO: 1797 - DNA, 16 bp, synthetic construct
  source 1..16: mol_type = other DNA
accagattgagtctcc

SEQ ID NO: 1798 - DNA, 16 bp, synthetic construct
  source 1..16: mol_type = other DNA
ctctaattttacgatc

SEQ ID NO: 1799 - DNA, 16 bp, synthetic construct
  source 1..16: mol_type = other DNA
agcttagaaattgcag

SEQ ID NO: 1800 - DNA, 16 bp, synthetic construct
  source 1..16: mol_type = other DNA
cagggtaatattcaga

SEQ ID NO: 1801 - DNA, 16 bp, synthetic construct
  source 1..16: mol_type = other DNA
tttgtagcagacagat

SEQ ID NO: 1802 - DNA, 16 bp, synthetic construct
  source 1..16: mol_type = other DNA
ttttaacagctcaggt

SEQ ID NO: 1803 - DNA, 16 bp, synthetic construct
  source 1..16: mol_type = other DNA
aattctagacatggcc

SEQ ID NO: 1804 - DNA, 16 bp, synthetic construct
  source 1..16: mol_type = other DNA
taaccaatatactgag

SEQ ID NO: 1805 - DNA, 16 bp, synthetic construct
  source 1..16: mol_type = other DNA
cgcaaaaagacaacga

SEQ ID NO: 1806 - DNA, 16 bp, synthetic construct
  source 1..16: mol_type = other DNA
gacatgacagactaac

SEQ ID NO: 1807 - DNA, 16 bp, synthetic construct
  source 1..16: mol_type = other DNA
ccatcaatgctgcact

SEQ ID NO: 1808 - DNA, 16 bp, synthetic construct
  source 1..16: mol_type = other DNA
agttgaaggatggatg

SEQ ID NO: 1809 - DNA, 16 bp, synthetic construct
  source 1..16: mol_type = other DNA
ctggtaagagagatgc

SEQ ID NO: 1810 - DNA, 16 bp, synthetic construct
  source 1..16: mol_type = other DNA
gaggttccctgtgcag

SEQ ID NO: 1811 - DNA, 16 bp, synthetic construct
  source 1..16: mol_type = other DNA
caagaacctgaatgca

SEQ ID NO: 1812 - DNA, 16 bp, synthetic construct
  source 1..16: mol_type = other DNA
aggatgctgagacgca

SEQ ID NO: 1813 - DNA, 16 bp, synthetic construct
  source 1..16: mol_type = other DNA
tcacagactcttctct

SEQ ID NO: 1814 - DNA, 16 bp, synthetic construct
  source 1..16: mol_type = other DNA
acctctgaaagaatct

SEQ ID NO: 1815 - DNA, 16 bp, synthetic construct
  source 1..16: mol_type = other DNA
aggtagctgcacaaag

SEQ ID NO: 1816 - DNA, 16 bp, synthetic construct
  source 1..16: mol_type = other DNA
cagtctgaccattaat

SEQ ID NO: 1817 - DNA, 16 bp, synthetic construct
  source 1..16: mol_type = other DNA
gaaaaaggtgttctaa

SEQ ID NO: 1818 - DNA, 16 bp, synthetic construct
  source 1..16: mol_type = other DNA
aaattcaacaggtaac

SEQ ID NO: 1819 - DNA, 16 bp, synthetic construct
  source 1..16: mol_type = other DNA
ttctactaacatctca

SEQ ID NO: 1820 - DNA, 16 bp, synthetic construct
  source 1..16: mol_type = other DNA
atgatcatgtggcggt

SEQ ID NO: 1821 - DNA, 16 bp, synthetic construct
  source 1..16: mol_type = other DNA
acttttattgttgcta

SEQ ID NO: 1822 - DNA, 16 bp, synthetic construct
  source 1..16: mol_type = other DNA
gagtgtactttaggct

SEQ ID NO: 1823 - DNA, 16 bp, synthetic construct
  source 1..16: mol_type = other DNA
ctatcaggtgcaggag

SEQ ID NO: 1824 - DNA, 16 bp, synthetic construct
  source 1..16: mol_type = other DNA
caatgacatcatggct

SEQ ID NO: 1825 - DNA, 16 bp, synthetic construct
  source 1..16: mol_type = other DNA
tactttattcaatgtg

SEQ ID NO: 1826 - DNA, 16 bp, synthetic construct
  source 1..16: mol_type = other DNA
attgggctcaatgaaa

SEQ ID NO: 1827 - DNA, 16 bp, synthetic construct
  source 1..16: mol_type = other DNA
tggcttagtatgaaat

SEQ ID NO: 1828 - DNA, 16 bp, synthetic construct
  source 1..16: mol_type = other DNA
tttggcaaggccagaa

SEQ ID NO: 1829 - DNA, 16 bp, synthetic construct
  source 1..16: mol_type = other DNA
gcatagaggaagctcg

SEQ ID NO: 1830 - DNA, 16 bp, synthetic construct
  source 1..16: mol_type = other DNA
gacagtaactggtagc

SEQ ID NO: 1831 - DNA, 16 bp, synthetic construct
  source 1..16: mol_type = other DNA
ttctgtttgattgtgc

SEQ ID NO: 1832 - DNA, 16 bp, synthetic construct
  source 1..16: mol_type = other DNA
aggtctgggtatatgt

SEQ ID NO: 1833 - DNA, 16 bp, synthetic construct
  source 1..16: mol_type = other DNA
ccctgactatataacc

SEQ ID NO: 1834 - DNA, 16 bp, synthetic construct
  source 1..16: mol_type = other DNA
ttgaccgtgtttccaa

SEQ ID NO: 1835 - DNA, 16 bp, synthetic construct
  source 1..16: mol_type = other DNA
aaactaccgaacgcag

SEQ ID NO: 1836 - DNA, 16 bp, synthetic construct
  source 1..16: mol_type = other DNA
tggtagagtggtaagg

SEQ ID NO: 1837 - DNA, 16 bp, synthetic construct
  source 1..16: mol_type = other DNA
gcatagccttctttct

SEQ ID NO: 1838 - DNA, 16 bp, synthetic construct
  source 1..16: mol_type = other DNA
caatcctgttagacag

SEQ ID NO: 1839 - DNA, 16 bp, synthetic construct
  source 1..16: mol_type = other DNA
ttataaagcacacggg

SEQ ID NO: 1840 - DNA, 16 bp, synthetic construct
  source 1..16: mol_type = other DNA
caataagagctgtctc

SEQ ID NO: 1841 - DNA, 16 bp, synthetic construct
  source 1..16: mol_type = other DNA
tgcaggcaccccagca

SEQ ID NO: 1842 - DNA, 16 bp, synthetic construct
  source 1..16: mol_type = other DNA
gaatgtcacccttcca

SEQ ID NO: 1843 - DNA, 16 bp, synthetic construct
  source 1..16: mol_type = other DNA
tcattggaagaccgca

SEQ ID NO: 1844 - DNA, 16 bp, synthetic construct
  source 1..16: mol_type = other DNA
gaccgctagtaaatgc

SEQ ID NO: 1845 - DNA, 16 bp, synthetic construct
  source 1..16: mol_type = other DNA
ttagaactaaggcaaa

SEQ ID NO: 1846 - DNA, 16 bp, synthetic construct
  source 1..16: mol_type = other DNA
tggagtcatgacatcc

SEQ ID NO: 1847 - DNA, 16 bp, synthetic construct
  source 1..16: mol_type = other DNA
ctgagcagataaatac

SEQ ID NO: 1848 - DNA, 16 bp, synthetic construct
  source 1..16: mol_type = other DNA
agtcttaatgtggatt

SEQ ID NO: 1849 - DNA, 16 bp, synthetic construct
  source 1..16: mol_type = other DNA
agtgtccccatcccca

SEQ ID NO: 1850 - DNA, 16 bp, synthetic construct
  source 1..16: mol_type = other DNA
aatattgccaggtatc

SEQ ID NO: 1851 - DNA, 16 bp, synthetic construct
  source 1..16: mol_type = other DNA
tagtgttggtttataa

SEQ ID NO: 1852 - DNA, 16 bp, synthetic construct
  source 1..16: mol_type = other DNA
tgacttagtccgtgtt

SEQ ID NO: 1853 - DNA, 16 bp, synthetic construct
  source 1..16: mol_type = other DNA
tctgtagctggtttgt

SEQ ID NO: 1854 - DNA, 16 bp, synthetic construct
  source 1..16: mol_type = other DNA
tcccatctcttagggc

SEQ ID NO: 1855 - DNA, 16 bp, synthetic construct
  source 1..16: mol_type = other DNA
tatgtttggaagtcgc

SEQ ID NO: 1856 - DNA, 16 bp, synthetic construct
  source 1..16: mol_type = other DNA
aatcagaggaagccca

SEQ ID NO: 1857 - DNA, 16 bp, synthetic construct
  source 1..16: mol_type = other DNA
aaccagattgagtctc

SEQ ID NO: 1858 - DNA, 16 bp, synthetic construct
  source 1..16: mol_type = other DNA
tctctaattttacgat

SEQ ID NO: 1859 - DNA, 16 bp, synthetic construct
  source 1..16: mol_type = other DNA
cagcttagaaattgca

SEQ ID NO: 1860 - DNA, 16 bp, synthetic construct
  source 1..16: mol_type = other DNA
ccagggtaatattcag

SEQ ID NO: 1861 - DNA, 16 bp, synthetic construct
  source 1..16: mol_type = other DNA
ctttgtagcagacaga

SEQ ID NO: 1862 - DNA, 16 bp, synthetic construct
  source 1..16: mol_type = other DNA
tattttaacagctcag

SEQ ID NO: 1863 - DNA, 16 bp, synthetic construct
  source 1..16: mol_type = other DNA
tgcaattctagacatg

SEQ ID NO: 1864 - DNA, 16 bp, synthetic construct
  source 1..16: mol_type = other DNA
actaaccaatatactg

SEQ ID NO: 1865 - DNA, 16 bp, synthetic construct
  source 1..16: mol_type = other DNA
caacagattactggac

SEQ ID NO: 1866 - DNA, 16 bp, synthetic construct
  source 1..16: mol_type = other DNA
aggacatgacagacta

SEQ ID NO: 1867 - DNA, 16 bp, synthetic construct
  source 1..16: mol_type = other DNA
accatcaatgctgcac

SEQ ID NO: 1868 - DNA, 16 bp, synthetic construct
  source 1..16: mol_type = other DNA
aagttgaaggatggat

SEQ ID NO: 1869 - DNA, 16 bp, synthetic construct
  source 1..16: mol_type = other DNA
ttggcatcaatgaagg

SEQ ID NO: 1870 - DNA, 16 bp, synthetic construct
  source 1..16: mol_type = other DNA
agaggttccctgtgca

SEQ ID NO: 1871 - DNA, 16 bp, synthetic construct
  source 1..16: mol_type = other DNA
ccaagaacctgaatgc

SEQ ID NO: 1872 - DNA, 16 bp, synthetic construct
  source 1..16: mol_type = other DNA
ggcaggatgctgagac

SEQ ID NO: 1873 - DNA, 16 bp, synthetic construct
  source 1..16: mol_type = other DNA
ctcacagactcttctc

SEQ ID NO: 1874 - DNA, 16 bp, synthetic construct
  source 1..16: mol_type = other DNA
gcacctctgaaagaat

SEQ ID NO: 1875 - DNA, 16 bp, synthetic construct
  source 1..16: mol_type = other DNA
ggaggtagctgcacaa

SEQ ID NO: 1876 - DNA, 16 bp, synthetic construct
  source 1..16: mol_type = other DNA
acagtctgaccattaa

SEQ ID NO: 1877 - DNA, 16 bp, synthetic construct
  source 1..16: mol_type = other DNA
ttaggtgaaaaaggtg

SEQ ID NO: 1878 - DNA, 16 bp, synthetic construct
  source 1..16: mol_type = other DNA
tgattcacataataca

SEQ ID NO: 1879 - DNA, 16 bp, synthetic construct
  source 1..16: mol_type = other DNA
tattctactaacatct

SEQ ID NO: 1880 - DNA, 16 bp, synthetic construct
  source 1..16: mol_type = other DNA
aatgatcatgtggcgg

SEQ ID NO: 1881 - DNA, 16 bp, synthetic construct
  source 1..16: mol_type = other DNA
tgacttttattgttgc

SEQ ID NO: 1882 - DNA, 16 bp, synthetic construct
  source 1..16: mol_type = other DNA
tgagtgtactttaggc

SEQ ID NO: 1883 - DNA, 16 bp, synthetic construct
  source 1..16: mol_type = other DNA
atgctatcaggtgcag

SEQ ID NO: 1884 - DNA, 16 bp, synthetic construct
  source 1..16: mol_type = other DNA
gcacaatgacatcatg

SEQ ID NO: 1885 - DNA, 16 bp, synthetic construct
  source 1..16: mol_type = other DNA
ttactttattcaatgt

SEQ ID NO: 1886 - DNA, 16 bp, synthetic construct
  source 1..16: mol_type = other DNA
tattgggctcaatgaa

SEQ ID NO: 1887 - DNA, 16 bp, synthetic construct
  source 1..16: mol_type = other DNA
tatgggagccacatgt

SEQ ID NO: 1888 - DNA, 16 bp, synthetic construct
  source 1..16: mol_type = other DNA
cttttggcaaggccag

SEQ ID NO: 1889 - DNA, 16 bp, synthetic construct
  source 1..16: mol_type = other DNA
ttaaacagaggatgca

SEQ ID NO: 1890 - DNA, 16 bp, synthetic construct
  source 1..16: mol_type = other DNA
agacagtaactggtag

SEQ ID NO: 1891 - DNA, 16 bp, synthetic construct
  source 1..16: mol_type = other DNA
tccgttaaccatcaag

SEQ ID NO: 1892 - DNA, 16 bp, synthetic construct
  source 1..16: mol_type = other DNA
ttaggtctgggtatat

SEQ ID NO: 1893 - DNA, 16 bp, synthetic construct
  source 1..16: mol_type = other DNA
cccctgactatataac

SEQ ID NO: 1894 - DNA, 16 bp, synthetic construct
  source 1..16: mol_type = other DNA
cttgaccgtgtttcca

SEQ ID NO: 1895 - DNA, 16 bp, synthetic construct
  source 1..16: mol_type = other DNA
ttaaactaccgaacgc

SEQ ID NO: 1896 - DNA, 16 bp, synthetic construct
  source 1..16: mol_type = other DNA
atggtagagtggtaag

SEQ ID NO: 1897 - DNA, 16 bp, synthetic construct
  source 1..16: mol_type = other DNA
attgcatagccttctt

SEQ ID NO: 1898 - DNA, 16 bp, synthetic construct
  source 1..16: mol_type = other DNA
ccaatcctgttagaca

SEQ ID NO: 1899 - DNA, 16 bp, synthetic construct
  source 1..16: mol_type = other DNA
ctgcttataaagcaca

SEQ ID NO: 1900 - DNA, 16 bp, synthetic construct
  source 1..16: mol_type = other DNA
acaataagagctgtct

SEQ ID NO: 1901 - DNA, 16 bp, synthetic construct
  source 1..16: mol_type = other DNA
tttgcaggcaccccag

SEQ ID NO: 1902 - DNA, 16 bp, synthetic construct
  source 1..16: mol_type = other DNA
tgaatgtcacccttcc

SEQ ID NO: 1903 - DNA, 16 bp, synthetic construct
  source 1..16: mol_type = other DNA
gcatcattggaagacc

SEQ ID NO: 1904 - DNA, 16 bp, synthetic construct
  source 1..16: mol_type = other DNA
accaagaccgctagta

SEQ ID NO: 1905 - DNA, 16 bp, synthetic construct
  source 1..16: mol_type = other DNA
tgttagaactaaggca

SEQ ID NO: 1906 - DNA, 16 bp, synthetic construct
  source 1..16: mol_type = other DNA
cctggagtcatgacat

SEQ ID NO: 1907 - DNA, 16 bp, synthetic construct
  source 1..16: mol_type = other DNA
tctgagcagataaata

SEQ ID NO: 1908 - DNA, 16 bp, synthetic construct
  source 1..16: mol_type = other DNA
aagtcttaatgtggat

SEQ ID NO: 1909 - DNA, 16 bp, synthetic construct
  source 1..16: mol_type = other DNA
ttagtgtccccatccc

SEQ ID NO: 1910 - DNA, 16 bp, synthetic construct
  source 1..16: mol_type = other DNA
gaatattgccaggtat

SEQ ID NO: 1911 - DNA, 16 bp, synthetic construct
  source 1..16: mol_type = other DNA
ttagtgttggtttata

SEQ ID NO: 1912 - DNA, 16 bp, synthetic construct
  source 1..16: mol_type = other DNA
tttgacttagtccgtg

SEQ ID NO: 1913 - DNA, 16 bp, synthetic construct
  source 1..16: mol_type = other DNA
ctctgtagctggtttg

SEQ ID NO: 1914 - DNA, 16 bp, synthetic construct
  source 1..16: mol_type = other DNA
ttgatagtgaatgtgt

SEQ ID NO: 1915 - DNA, 16 bp, synthetic construct
  source 1..16: mol_type = other DNA
atatgtttggaagtcg

SEQ ID NO: 1916 - DNA, 16 bp, synthetic construct
  source 1..16: mol_type = other DNA
caatcagaggaagccc

SEQ ID NO: 1917 - DNA, 16 bp, synthetic construct
  source 1..16: mol_type = other DNA
taaccagattgagtct

SEQ ID NO: 1918 - DNA, 16 bp, synthetic construct
  source 1..16: mol_type = other DNA
gtctctaattttacga

SEQ ID NO: 1919 - DNA, 16 bp, synthetic construct
  source 1..16: mol_type = other DNA
acagcttagaaattgc

SEQ ID NO: 1920 - DNA, 16 bp, synthetic construct
  source 1..16: mol_type = other DNA
ctgtattagctcaata

SEQ ID NO: 1921 - DNA, 16 bp, synthetic construct
  source 1..16: mol_type = other DNA
tctttgtagcagacag

SEQ ID NO: 1922 - DNA, 16 bp, synthetic construct
  source 1..16: mol_type = other DNA
ttattttaacagctca

SEQ ID NO: 1923 - DNA, 16 bp, synthetic construct
  source 1..16: mol_type = other DNA
ctgcaattctagacat

SEQ ID NO: 1924 - DNA, 16 bp, synthetic construct
  source 1..16: mol_type = other DNA
catttcagagtataag

SEQ ID NO: 1925 - DNA, 16 bp, synthetic construct
  source 1..16: mol_type = other DNA
gatgtgagtgaaataa

SEQ ID NO: 1926 - DNA, 16 bp, synthetic construct
  source 1..16: mol_type = other DNA
aaggacatgacagact

SEQ ID NO: 1927 - DNA, 16 bp, synthetic construct
  source 1..16: mol_type = other DNA
ccaccatcaatgctgc

SEQ ID NO: 1928 - DNA, 16 bp, synthetic construct
  source 1..16: mol_type = other DNA
tttggcatcaatgaag

SEQ ID NO: 1929 - DNA, 16 bp, synthetic construct
  source 1..16: mol_type = other DNA
tagaggttccctgtgc

SEQ ID NO: 1930 - DNA, 16 bp, synthetic construct
  source 1..16: mol_type = other DNA
gggcaggatgctgaga

SEQ ID NO: 1931 - DNA, 16 bp, synthetic construct
  source 1..16: mol_type = other DNA
actcacagactcttct

SEQ ID NO: 1932 - DNA, 16 bp, synthetic construct
  source 1..16: mol_type = other DNA
agcacctctgaaagaa

SEQ ID NO: 1933 - DNA, 16 bp, synthetic construct
  source 1..16: mol_type = other DNA
cggaggtagctgcaca

SEQ ID NO: 1934 - DNA, 16 bp, synthetic construct
  source 1..16: mol_type = other DNA
attctaagaacctcat

SEQ ID NO: 1935 - DNA, 16 bp, synthetic construct
  source 1..16: mol_type = other DNA
aaacaaaccctccgtc

SEQ ID NO: 1936 - DNA, 16 bp, synthetic construct
  source 1..16: mol_type = other DNA
aaatgatcatgtggcg

SEQ ID NO: 1937 - DNA, 16 bp, synthetic construct
  source 1..16: mol_type = other DNA
ctgacttttattgttg

SEQ ID NO: 1938 - DNA, 16 bp, synthetic construct
  source 1..16: mol_type = other DNA
gtgagtgtactttagg

SEQ ID NO: 1939 - DNA, 16 bp, synthetic construct
  source 1..16: mol_type = other DNA
aatgctatcaggtgca

SEQ ID NO: 1940 - DNA, 16 bp, synthetic construct
  source 1..16: mol_type = other DNA
tgcacaatgacatcat

SEQ ID NO: 1941 - DNA, 16 bp, synthetic construct
  source 1..16: mol_type = other DNA
ctacctgtgtctttta

SEQ ID NO: 1942 - DNA, 16 bp, synthetic construct
  source 1..16: mol_type = other DNA
atatattgggctcaat

SEQ ID NO: 1943 - DNA, 16 bp, synthetic construct
  source 1..16: mol_type = other DNA
acttttggcaaggcca

SEQ ID NO: 1944 - DNA, 16 bp, synthetic construct
  source 1..16: mol_type = other DNA
ccgcaaacaaggttaa

SEQ ID NO: 1945 - DNA, 16 bp, synthetic construct
  source 1..16: mol_type = other DNA
tttaggtctgggtata

SEQ ID NO: 1946 - DNA, 16 bp, synthetic construct
  source 1..16: mol_type = other DNA
ccccctgactatataa

SEQ ID NO: 1947 - DNA, 16 bp, synthetic construct
  source 1..16: mol_type = other DNA
tcttgaccgtgtttcc

SEQ ID NO: 1948 - DNA, 16 bp, synthetic construct
  source 1..16: mol_type = other DNA
gcattgcatagccttc

SEQ ID NO: 1949 - DNA, 16 bp, synthetic construct
  source 1..16: mol_type = other DNA
aaccaatcctgttaga

SEQ ID NO: 1950 - DNA, 16 bp, synthetic construct
  source 1..16: mol_type = other DNA
tctgcttataaagcac

SEQ ID NO: 1951 - DNA, 16 bp, synthetic construct
  source 1..16: mol_type = other DNA
ctttgcaggcacccca

SEQ ID NO: 1952 - DNA, 16 bp, synthetic construct
  source 1..16: mol_type = other DNA
cttgaatgtcaccctt

SEQ ID NO: 1953 - DNA, 16 bp, synthetic construct
  source 1..16: mol_type = other DNA
ttaccaagaccgctag

SEQ ID NO: 1954 - DNA, 16 bp, synthetic construct
  source 1..16: mol_type = other DNA
acttttagtattaaag

SEQ ID NO: 1955 - DNA, 16 bp, synthetic construct
  source 1..16: mol_type = other DNA
aaagtcttaatgtgga

SEQ ID NO: 1956 - DNA, 16 bp, synthetic construct
  source 1..16: mol_type = other DNA
cttagtgtccccatcc

SEQ ID NO: 1957 - DNA, 16 bp, synthetic construct
  source 1..16: mol_type = other DNA
gttagtgttggtttat

SEQ ID NO: 1958 - DNA, 16 bp, synthetic construct
  source 1..16: mol_type = other DNA
gtttgacttagtccgt

SEQ ID NO: 1959 - DNA, 16 bp, synthetic construct
  source 1..16: mol_type = other DNA
aatatgtttggaagtc

SEQ ID NO: 1960 - DNA, 16 bp, synthetic construct
  source 1..16: mol_type = other DNA
agtaaccagattgagt

SEQ ID NO: 1961 - DNA, 16 bp, synthetic construct
  source 1..16: mol_type = other DNA
cacagcttagaaattg

SEQ ID NO: 1962 - DNA, 16 bp, synthetic construct
  source 1..16: mol_type = other DNA
cctgtattagctcaat

SEQ ID NO: 1963 - DNA, 16 bp, synthetic construct
  source 1..16: mol_type = other DNA
cctctttgtagcagac

SEQ ID NO: 1964 - DNA, 16 bp, synthetic construct
  source 1..16: mol_type = other DNA
ggttattttaacagct

SEQ ID NO: 1965 - DNA, 16 bp, synthetic construct
  source 1..16: mol_type = other DNA
acctgcaattctagac

SEQ ID NO: 1966 - DNA, 16 bp, synthetic construct
  source 1..16: mol_type = other DNA
aagatgtgagtgaaat

SEQ ID NO: 1967 - DNA, 16 bp, synthetic construct
  source 1..16: mol_type = other DNA
aaaggacatgacagac

SEQ ID NO: 1968 - DNA, 16 bp, synthetic construct
  source 1..16: mol_type = other DNA
gaggaacttgcttaag

SEQ ID NO: 1969 - DNA, 16 bp, synthetic construct
  source 1..16: mol_type = other DNA
ttttggcatcaatgaa

SEQ ID NO: 1970 - DNA, 16 bp, synthetic construct
  source 1..16: mol_type = other DNA
tctagcagctcatctc

SEQ ID NO: 1971 - DNA, 16 bp, synthetic construct
  source 1..16: mol_type = other DNA
ttagcacctctgaaag

SEQ ID NO: 1972 - DNA, 16 bp, synthetic construct
  source 1..16: mol_type = other DNA
atgtattagagttaag

SEQ ID NO: 1973 - DNA, 16 bp, synthetic construct
  source 1..16: mol_type = other DNA
cattctaagaacctca

SEQ ID NO: 1974 - DNA, 16 bp, synthetic construct
  source 1..16: mol_type = other DNA
ttagttaggtgaaaaa

SEQ ID NO: 1975 - DNA, 16 bp, synthetic construct
  source 1..16: mol_type = other DNA
cactgattcacataat

SEQ ID NO: 1976 - DNA, 16 bp, synthetic construct
  source 1..16: mol_type = other DNA
tgcaaatgatcatgtg

SEQ ID NO: 1977 - DNA, 16 bp, synthetic construct
  source 1..16: mol_type = other DNA
gctgacttttattgtt

SEQ ID NO: 1978 - DNA, 16 bp, synthetic construct
  source 1..16: mol_type = other DNA
agtgagtgtactttag

SEQ ID NO: 1979 - DNA, 16 bp, synthetic construct
  source 1..16: mol_type = other DNA
ttaatgctatcaggtg

SEQ ID NO: 1980 - DNA, 16 bp, synthetic construct
  source 1..16: mol_type = other DNA
atgcacaatgacatca

SEQ ID NO: 1981 - DNA, 16 bp, synthetic construct
  source 1..16: mol_type = other DNA
attctacctgtgtctt

SEQ ID NO: 1982 - DNA, 16 bp, synthetic construct
  source 1..16: mol_type = other DNA
ttggatatattgggct

SEQ ID NO: 1983 - DNA, 16 bp, synthetic construct
  source 1..16: mol_type = other DNA
tacttttggcaaggcc

SEQ ID NO: 1984 - DNA, 16 bp, synthetic construct
  source 1..16: mol_type = other DNA
gcacagagtaggttaa

SEQ ID NO: 1985 - DNA, 16 bp, synthetic construct
  source 1..16: mol_type = other DNA
tggtagctcctggcaa

SEQ ID NO: 1986 - DNA, 16 bp, synthetic construct
  source 1..16: mol_type = other DNA
tttccgttaaccatca

SEQ ID NO: 1987 - DNA, 16 bp, synthetic construct
  source 1..16: mol_type = other DNA
catcttagtggctggg

SEQ ID NO: 1988 - DNA, 16 bp, synthetic construct
  source 1..16: mol_type = other DNA
gttcttgaccgtgttt

SEQ ID NO: 1989 - DNA, 16 bp, synthetic construct
  source 1..16: mol_type = other DNA
ggttaaactaccgaac

SEQ ID NO: 1990 - DNA, 16 bp, synthetic construct
  source 1..16: mol_type = other DNA
catggtctgcaaattt

SEQ ID NO: 1991 - DNA, 16 bp, synthetic construct
  source 1..16: mol_type = other DNA
aaaccaatcctgttag

SEQ ID NO: 1992 - DNA, 16 bp, synthetic construct
  source 1..16: mol_type = other DNA
atctgcttataaagca

SEQ ID NO: 1993 - DNA, 16 bp, synthetic construct
  source 1..16: mol_type = other DNA
actttgcaggcacccc

SEQ ID NO: 1994 - DNA, 16 bp, synthetic construct
  source 1..16: mol_type = other DNA
gcttgaatgtcaccct

SEQ ID NO: 1995 - DNA, 16 bp, synthetic construct
  source 1..16: mol_type = other DNA
tttaccaagaccgcta

SEQ ID NO: 1996 - DNA, 16 bp, synthetic construct
  source 1..16: mol_type = other DNA
caacttttagtattaa

SEQ ID NO: 1997 - DNA, 16 bp, synthetic construct
  source 1..16: mol_type = other DNA
tcgacacagcatcacc

SEQ ID NO: 1998 - DNA, 16 bp, synthetic construct
  source 1..16: mol_type = other DNA
tcttagtgtccccatc

SEQ ID NO: 1999 - DNA, 16 bp, synthetic construct
  source 1..16: mol_type = other DNA
ttaggaatattgccag

SEQ ID NO: 2000 - DNA, 16 bp, synthetic construct
  source 1..16: mol_type = other DNA
gggttagtgttggttt

SEQ ID NO: 2001 - DNA, 16 bp, synthetic construct
  source 1..16: mol_type = other DNA
tagggcacctcaagaa

SEQ ID NO: 2002 - DNA, 16 bp, synthetic construct
  source 1..16: mol_type = other DNA
caaatatgtttggaag

SEQ ID NO: 2003 - DNA, 16 bp, synthetic construct
  source 1..16: mol_type = other DNA
cccaatcagaggaagc

SEQ ID NO: 2004 - DNA, 16 bp, synthetic construct
  source 1..16: mol_type = other DNA
tcatcattattacctg

SEQ ID NO: 2005 - DNA, 16 bp, synthetic construct
  source 1..16: mol_type = other DNA
ttcagaccagggtaat

SEQ ID NO: 2006 - DNA, 16 bp, synthetic construct
  source 1..16: mol_type = other DNA
gcctgtattagctcaa

SEQ ID NO: 2007 - DNA, 16 bp, synthetic construct
  source 1..16: mol_type = other DNA
gcctctttgtagcaga

SEQ ID NO: 2008 - DNA, 16 bp, synthetic construct
  source 1..16: mol_type = other DNA
tactgagaggaaatga

SEQ ID NO: 2009 - DNA, 16 bp, synthetic construct
  source 1..16: mol_type = other DNA
tgtaaagatgtgagtg

SEQ ID NO: 2010 - DNA, 16 bp, synthetic construct
  source 1..16: mol_type = other DNA
tcaaaggacatgacag

SEQ ID NO: 2011 - DNA, 16 bp, synthetic construct
  source 1..16: mol_type = other DNA
gagcaacgaggaagga

SEQ ID NO: 2012 - DNA, 16 bp, synthetic construct
  source 1..16: mol_type = other DNA
cctgtcggaggaactt

SEQ ID NO: 2013 - DNA, 16 bp, synthetic construct
  source 1..16: mol_type = other DNA
ttgttttggcatcaat

SEQ ID NO: 2014 - DNA, 16 bp, synthetic construct
  source 1..16: mol_type = other DNA
aatgcatccaaatatc

SEQ ID NO: 2015 - DNA, 16 bp, synthetic construct
  source 1..16: mol_type = other DNA
tggtctagcagctcat

SEQ ID NO: 2016 - DNA, 16 bp, synthetic construct
  source 1..16: mol_type = other DNA
ttacataagacattat

SEQ ID NO: 2017 - DNA, 16 bp, synthetic construct
  source 1..16: mol_type = other DNA
ctcaagtgactcacag

SEQ ID NO: 2018 - DNA, 16 bp, synthetic construct
  source 1..16: mol_type = other DNA
tttagcacctctgaaa

SEQ ID NO: 2019 - DNA, 16 bp, synthetic construct
  source 1..16: mol_type = other DNA
tttcccaaccagctga

SEQ ID NO: 2020 - DNA, 16 bp, synthetic construct
  source 1..16: mol_type = other DNA
tcatctttgcagacca

SEQ ID NO: 2021 - DNA, 16 bp, synthetic construct
  source 1..16: mol_type = other DNA
tttagttaggtgaaaa

SEQ ID NO: 2022 - DNA, 16 bp, synthetic construct
  source 1..16: mol_type = other DNA
tcactgattcacataa

SEQ ID NO: 2023 - DNA, 16 bp, synthetic construct
  source 1..16: mol_type = other DNA
gagaaacaaaccctcc

SEQ ID NO: 2024 - DNA, 16 bp, synthetic construct
  source 1..16: mol_type = other DNA
gtgcaaatgatcatgt

SEQ ID NO: 2025 - DNA, 16 bp, synthetic construct
  source 1..16: mol_type = other DNA
aagctgacttttattg

SEQ ID NO: 2026 - DNA, 16 bp, synthetic construct
  source 1..16: mol_type = other DNA
tcttgggatgcacagg

SEQ ID NO: 2027 - DNA, 16 bp, synthetic construct
  source 1..16: mol_type = other DNA
ccttaatgctatcagg

SEQ ID NO: 2028 - DNA, 16 bp, synthetic construct
  source 1..16: mol_type = other DNA
aatgcacaatgacatc

SEQ ID NO: 2029 - DNA, 16 bp, synthetic construct
  source 1..16: mol_type = other DNA
aattctacctgtgtct

SEQ ID NO: 2030 - DNA, 16 bp, synthetic construct
  source 1..16: mol_type = other DNA
tttggatatattgggc

SEQ ID NO: 2031 - DNA, 16 bp, synthetic construct
  source 1..16: mol_type = other DNA
ctactatgggagccac

SEQ ID NO: 2032 - DNA, 16 bp, synthetic construct
  source 1..16: mol_type = other DNA
taatacttttggcaag

SEQ ID NO: 2033 - DNA, 16 bp, synthetic construct
  source 1..16: mol_type = other DNA
ttataggcgagagcac

SEQ ID NO: 2034 - DNA, 16 bp, synthetic construct
  source 1..16: mol_type = other DNA
ctggtagctcctggca

SEQ ID NO: 2035 - DNA, 16 bp, synthetic construct
  source 1..16: mol_type = other DNA
gattgtgcagacagta

SEQ ID NO: 2036 - DNA, 16 bp, synthetic construct
  source 1..16: mol_type = other DNA
atttccgttaaccatc

SEQ ID NO: 2037 - DNA, 16 bp, synthetic construct
  source 1..16: mol_type = other DNA
tgagttttaggtctgg

SEQ ID NO: 2038 - DNA, 16 bp, synthetic construct
  source 1..16: mol_type = other DNA
atcatcttagtggctg

SEQ ID NO: 2039 - DNA, 16 bp, synthetic construct
  source 1..16: mol_type = other DNA
tgttcttgaccgtgtt

SEQ ID NO: 2040 - DNA, 16 bp, synthetic construct
  source 1..16: mol_type = other DNA
aaggttaaactaccga

SEQ ID NO: 2041 - DNA, 16 bp, synthetic construct
  source 1..16: mol_type = other DNA
tacatggtctgcaaat

SEQ ID NO: 2042 - DNA, 16 bp, synthetic construct
  source 1..16: mol_type = other DNA
cattgcattgcatagc

SEQ ID NO: 2043 - DNA, 16 bp, synthetic construct
  source 1..16: mol_type = other DNA
aaaaccaatcctgtta

SEQ ID NO: 2044 - DNA, 16 bp, synthetic construct
  source 1..16: mol_type = other DNA
catctgcttataaagc

SEQ ID NO: 2045 - DNA, 16 bp, synthetic construct
  source 1..16: mol_type = other DNA
aaactttgcagcctat

SEQ ID NO: 2046 - DNA, 16 bp, synthetic construct
  source 1..16: mol_type = other DNA
agactttgcaggcacc

SEQ ID NO: 2047 - DNA, 16 bp, synthetic construct
  source 1..16: mol_type = other DNA
ggcttgaatgtcaccc

SEQ ID NO: 2048 - DNA, 16 bp, synthetic construct
  source 1..16: mol_type = other DNA
aatgcttgtcaaaagg

SEQ ID NO: 2049 - DNA, 16 bp, synthetic construct
  source 1..16: mol_type = other DNA
ctttaccaagaccgct

SEQ ID NO: 2050 - DNA, 16 bp, synthetic construct
  source 1..16: mol_type = other DNA
taagtgttagaactaa

SEQ ID NO: 2051 - DNA, 16 bp, synthetic construct
  source 1..16: mol_type = other DNA
accaacttttagtatt

SEQ ID NO: 2052 - DNA, 16 bp, synthetic construct
  source 1..16: mol_type = other DNA
catcgacacagcatca

SEQ ID NO: 2053 - DNA, 16 bp, synthetic construct
  source 1..16: mol_type = other DNA
ccaaagtcttaatgtg

SEQ ID NO: 2054 - DNA, 16 bp, synthetic construct
  source 1..16: mol_type = other DNA
ccatctcttagtgtcc

SEQ ID NO: 2055 - DNA, 16 bp, synthetic construct
  source 1..16: mol_type = other DNA
cttaggaatattgcca

SEQ ID NO: 2056 - DNA, 16 bp, synthetic construct
  source 1..16: mol_type = other DNA
agggttagtgttggtt

SEQ ID NO: 2057 - DNA, 16 bp, synthetic construct
  source 1..16: mol_type = other DNA
tctgtttgacttagtc

SEQ ID NO: 2058 - DNA, 16 bp, synthetic construct
  source 1..16: mol_type = other DNA
cttagggcacctcaag

SEQ ID NO: 2059 - DNA, 16 bp, synthetic construct
  source 1..16: mol_type = other DNA
taatctggtcatatgg

SEQ ID NO: 2060 - DNA, 16 bp, synthetic construct
  source 1..16: mol_type = other DNA
tgcttacggagcatag

SEQ ID NO: 2061 - DNA, 16 bp, synthetic construct
  source 1..16: mol_type = other DNA
ctctagacgggaagct

SEQ ID NO: 2062 - DNA, 16 bp, synthetic construct
  source 1..16: mol_type = other DNA
gatcatcattattacc

SEQ ID NO: 2063 - DNA, 16 bp, synthetic construct
  source 1..16: mol_type = other DNA
ttgcagtgccctggcc

SEQ ID NO: 2064 - DNA, 16 bp, synthetic construct
  source 1..16: mol_type = other DNA
attcagaccagggtaa

SEQ ID NO: 2065 - DNA, 16 bp, synthetic construct
  source 1..16: mol_type = other DNA
atgcctgtattagctc

SEQ ID NO: 2066 - DNA, 16 bp, synthetic construct
  source 1..16: mol_type = other DNA
agcctctttgtagcag

SEQ ID NO: 2067 - DNA, 16 bp, synthetic construct
  source 1..16: mol_type = other DNA
gaggttattttaacag

SEQ ID NO: 2068 - DNA, 16 bp, synthetic construct
  source 1..16: mol_type = other DNA
atactgagaggaaatg

SEQ ID NO: 2069 - DNA, 16 bp, synthetic construct
  source 1..16: mol_type = other DNA
atgacatttcagagta

SEQ ID NO: 2070 - DNA, 16 bp, synthetic construct
  source 1..16: mol_type = other DNA
gtgtaaagatgtgagt

SEQ ID NO: 2071 - DNA, 16 bp, synthetic construct
  source 1..16: mol_type = other DNA
tgctgcactcaaagag

SEQ ID NO: 2072 - DNA, 16 bp, synthetic construct
  source 1..16: mol_type = other DNA
tcacaagagactggac

SEQ ID NO: 2073 - DNA, 16 bp, synthetic construct
  source 1..16: mol_type = other DNA
tggtggacattggccg

SEQ ID NO: 2074 - DNA, 16 bp, synthetic construct
  source 1..16: mol_type = other DNA
ggtgatggttgttttg

SEQ ID NO: 2075 - DNA, 16 bp, synthetic construct
  source 1..16: mol_type = other DNA
gaatgcatccaaatat

SEQ ID NO: 2076 - DNA, 16 bp, synthetic construct
  source 1..16: mol_type = other DNA
gtggtctagcagctca

SEQ ID NO: 2077 - DNA, 16 bp, synthetic construct
  source 1..16: mol_type = other DNA
cattacataagacatt

SEQ ID NO: 2078 - DNA, 16 bp, synthetic construct
  source 1..16: mol_type = other DNA
cctcaagtgactcaca

SEQ ID NO: 2079 - DNA, 16 bp, synthetic construct
  source 1..16: mol_type = other DNA
ctttagcacctctgaa

SEQ ID NO: 2080 - DNA, 16 bp, synthetic construct
  source 1..16: mol_type = other DNA
atttcccaaccagctg

SEQ ID NO: 2081 - DNA, 16 bp, synthetic construct
  source 1..16: mol_type = other DNA
ttatcatctttgcaga

SEQ ID NO: 2082 - DNA, 16 bp, synthetic construct
  source 1..16: mol_type = other DNA
ttttagttaggtgaaa

SEQ ID NO: 2083 - DNA, 16 bp, synthetic construct
  source 1..16: mol_type = other DNA
ctcactgattcacata

SEQ ID NO: 2084 - DNA, 16 bp, synthetic construct
  source 1..16: mol_type = other DNA
tgagaaacaaaccctc

SEQ ID NO: 2085 - DNA, 16 bp, synthetic construct
  source 1..16: mol_type = other DNA
tgtgcaaatgatcatg

SEQ ID NO: 2086 - DNA, 16 bp, synthetic construct
  source 1..16: mol_type = other DNA
taggctcctgggacct

SEQ ID NO: 2087 - DNA, 16 bp, synthetic construct
  source 1..16: mol_type = other DNA
atcttgggatgcacag

SEQ ID NO: 2088 - DNA, 16 bp, synthetic construct
  source 1..16: mol_type = other DNA
tcatggcttccagtgt

SEQ ID NO: 2089 - DNA, 16 bp, synthetic construct
  source 1..16: mol_type = other DNA
ttcaatgtggcttcta

SEQ ID NO: 2090 - DNA, 16 bp, synthetic construct
  source 1..16: mol_type = other DNA
ttaattctacctgtgt

SEQ ID NO: 2091 - DNA, 16 bp, synthetic construct
  source 1..16: mol_type = other DNA
tgaaatatctcattag

SEQ ID NO: 2092 - DNA, 16 bp, synthetic construct
  source 1..16: mol_type = other DNA
tgtctactatgggagc

SEQ ID NO: 2093 - DNA, 16 bp, synthetic construct
  source 1..16: mol_type = other DNA
atggtaatacttttgg

SEQ ID NO: 2094 - DNA, 16 bp, synthetic construct
  source 1..16: mol_type = other DNA
actggtagctcctggc

SEQ ID NO: 2095 - DNA, 16 bp, synthetic construct
  source 1..16: mol_type = other DNA
tgattgtgcagacagt

SEQ ID NO: 2096 - DNA, 16 bp, synthetic construct
  source 1..16: mol_type = other DNA
tatttccgttaaccat

SEQ ID NO: 2097 - DNA, 16 bp, synthetic construct
  source 1..16: mol_type = other DNA
ctgagttttaggtctg

SEQ ID NO: 2098 - DNA, 16 bp, synthetic construct
  source 1..16: mol_type = other DNA
gaatcatcttagtggc

SEQ ID NO: 2099 - DNA, 16 bp, synthetic construct
  source 1..16: mol_type = other DNA
ttgttcttgaccgtgt

SEQ ID NO: 2100 - DNA, 16 bp, synthetic construct
  source 1..16: mol_type = other DNA
gtggtaaggcatacta

SEQ ID NO: 2101 - DNA, 16 bp, synthetic construct
  source 1..16: mol_type = other DNA
ggtgtacatggtctgc

SEQ ID NO: 2102 - DNA, 16 bp, synthetic construct
  source 1..16: mol_type = other DNA
gcattgcattgcatag

SEQ ID NO: 2103 - DNA, 16 bp, synthetic construct
  source 1..16: mol_type = other DNA
ggaaaaccaatcctgt

SEQ ID NO: 2104 - DNA, 16 bp, synthetic construct
  source 1..16: mol_type = other DNA
agctgtctcctctact

SEQ ID NO: 2105 - DNA, 16 bp, synthetic construct
  source 1..16: mol_type = other DNA
caaactttgcagccta

SEQ ID NO: 2106 - DNA, 16 bp, synthetic construct
  source 1..16: mol_type = other DNA
gagactttgcaggcac

SEQ ID NO: 2107 - DNA, 16 bp, synthetic construct
  source 1..16: mol_type = other DNA
tcggcttgaatgtcac

SEQ ID NO: 2108 - DNA, 16 bp, synthetic construct
  source 1..16: mol_type = other DNA
gtaaatgcttgtcaaa

SEQ ID NO: 2109 - DNA, 16 bp, synthetic construct
  source 1..16: mol_type = other DNA
agtctttaccaagacc

SEQ ID NO: 2110 - DNA, 16 bp, synthetic construct
  source 1..16: mol_type = other DNA
catgacatcccagttc

SEQ ID NO: 2111 - DNA, 16 bp, synthetic construct
  source 1..16: mol_type = other DNA
aaccaacttttagtat

SEQ ID NO: 2112 - DNA, 16 bp, synthetic construct
  source 1..16: mol_type = other DNA
ccatcgacacagcatc

SEQ ID NO: 2113 - DNA, 16 bp, synthetic construct
  source 1..16: mol_type = other DNA
ctacttatccccaaag

SEQ ID NO: 2114 - DNA, 16 bp, synthetic construct
  source 1..16: mol_type = other DNA
gccatctcttagtgtc

SEQ ID NO: 2115 - DNA, 16 bp, synthetic construct
  source 1..16: mol_type = other DNA
ccttaggaatattgcc

SEQ ID NO: 2116 - DNA, 16 bp, synthetic construct
  source 1..16: mol_type = other DNA
gagggttagtgttggt

SEQ ID NO: 2117 - DNA, 16 bp, synthetic construct
  source 1..16: mol_type = other DNA
ctggtttgtgggttct

SEQ ID NO: 2118 - DNA, 16 bp, synthetic construct
  source 1..16: mol_type = other DNA
tcttagggcacctcaa

SEQ ID NO: 2119 - DNA, 16 bp, synthetic construct
  source 1..16: mol_type = other DNA
ttaatctggtcatatg

SEQ ID NO: 2120 - DNA, 16 bp, synthetic construct
  source 1..16: mol_type = other DNA
acaaaagcgacaaggt

SEQ ID NO: 2121 - DNA, 16 bp, synthetic construct
  source 1..16: mol_type = other DNA
ttgagtctcctgacca

SEQ ID NO: 2122 - DNA, 16 bp, synthetic construct
  source 1..16: mol_type = other DNA
cgatcatcattattac

SEQ ID NO: 2123 - DNA, 16 bp, synthetic construct
  source 1..16: mol_type = other DNA
attgcagtgccctggc

SEQ ID NO: 2124 - DNA, 16 bp, synthetic construct
  source 1..16: mol_type = other DNA
tattcagaccagggta

SEQ ID NO: 2125 - DNA, 16 bp, synthetic construct
  source 1..16: mol_type = other DNA
gatgcctgtattagct

SEQ ID NO: 2126 - DNA, 16 bp, synthetic construct
  source 1..16: mol_type = other DNA
gcagcctctttgtagc

SEQ ID NO: 2127 - DNA, 16 bp, synthetic construct
  source 1..16: mol_type = other DNA
ctgaggttattttaac

SEQ ID NO: 2128 - DNA, 16 bp, synthetic construct
  source 1..16: mol_type = other DNA
tatactgagaggaaat

SEQ ID NO: 2129 - DNA, 16 bp, synthetic construct
  source 1..16: mol_type = other DNA
atatgacatttcagag

SEQ ID NO: 2130 - DNA, 16 bp, synthetic construct
  source 1..16: mol_type = other DNA
cgtgtaaagatgtgag

SEQ ID NO: 2131 - DNA, 16 bp, synthetic construct
  source 1..16: mol_type = other DNA
aatgctgcactcaaag

SEQ ID NO: 2132 - DNA, 16 bp, synthetic construct
  source 1..16: mol_type = other DNA
taacaaactatgccta

SEQ ID NO: 2133 - DNA, 16 bp, synthetic construct
  source 1..16: mol_type = other DNA
aggaacttgcttaagt

SEQ ID NO: 2134 - DNA, 16 bp, synthetic construct
  source 1..16: mol_type = other DNA
agcagctcatctccct

SEQ ID NO: 2135 - DNA, 16 bp, synthetic construct
  source 1..16: mol_type = other DNA
agttaggtgaaaaagg

SEQ ID NO: 2136 - DNA, 16 bp, synthetic construct
  source 1..16: mol_type = other DNA
actgattcacataata

SEQ ID NO: 2137 - DNA, 16 bp, synthetic construct
  source 1..16: mol_type = other DNA
ctatgggagccacatg

SEQ ID NO: 2138 - DNA, 16 bp, synthetic construct
  source 1..16: mol_type = other DNA
cagacagtaactggta

SEQ ID NO: 2139 - DNA, 16 bp, synthetic construct
  source 1..16: mol_type = other DNA
ttccgttaaccatcaa

SEQ ID NO: 2140 - DNA, 16 bp, synthetic construct
  source 1..16: mol_type = other DNA
gttaaactaccgaacg

SEQ ID NO: 2141 - DNA, 16 bp, synthetic construct
  source 1..16: mol_type = other DNA
ctatggtagagtggta

SEQ ID NO: 2142 - DNA, 16 bp, synthetic construct
  source 1..16: mol_type = other DNA
ggacaataagagctgt

SEQ ID NO: 2143 - DNA, 16 bp, synthetic construct
  source 1..16: mol_type = other DNA
agcatcattggaagac

SEQ ID NO: 2144 - DNA, 16 bp, synthetic construct
  source 1..16: mol_type = other DNA
gtgttagaactaaggc

SEQ ID NO: 2145 - DNA, 16 bp, synthetic construct
  source 1..16: mol_type = other DNA
tttctgagcagataaa

SEQ ID NO: 2146 - DNA, 16 bp, synthetic construct
  source 1..16: mol_type = other DNA
taggaatattgccagg

SEQ ID NO: 2147 - DNA, 16 bp, synthetic construct
  source 1..16: mol_type = other DNA
aactctgtagctggtt

SEQ ID NO: 2148 - DNA, 16 bp, synthetic construct
  source 1..16: mol_type = other DNA
tcttgatagtgaatgt

SEQ ID NO: 2149 - DNA, 16 bp, synthetic construct
  source 1..16: mol_type = other DNA
ccaatcagaggaagcc

SEQ ID NO: 2150 - DNA, 16 bp, synthetic construct
  source 1..16: mol_type = other DNA
ctgtctctaattttac

SEQ ID NO: 2151 - DNA, 16 bp, synthetic construct
  source 1..16: mol_type = other DNA
gacatttcagagtata

SEQ ID NO: 2152 - DNA, 16 bp, synthetic construct
  source 1..16: mol_type = other DNA
gcaaatcggatctttg

SEQ ID NO: 2153 - DNA, 16 bp, synthetic construct
  source 1..16: mol_type = other DNA
agaaggtagaggttcc

SEQ ID NO: 2154 - DNA, 16 bp, synthetic construct
  source 1..16: mol_type = other DNA
cagggcaggatgctga

SEQ ID NO: 2155 - DNA, 16 bp, synthetic construct
  source 1..16: mol_type = other DNA
tgactcacagactctt

SEQ ID NO: 2156 - DNA, 16 bp, synthetic construct
  source 1..16: mol_type = other DNA
agaaacaaaccctccg

SEQ ID NO: 2157 - DNA, 16 bp, synthetic construct
  source 1..16: mol_type = other DNA
actatgggagccacat

SEQ ID NO: 2158 - DNA, 16 bp, synthetic construct
  source 1..16: mol_type = other DNA
ttgtgcagacagtaac

SEQ ID NO: 2159 - DNA, 16 bp, synthetic construct
  source 1..16: mol_type = other DNA
ttttaggtctgggtat

SEQ ID NO: 2160 - DNA, 16 bp, synthetic construct
  source 1..16: mol_type = other DNA
attgcattgcatagcc

SEQ ID NO: 2161 - DNA, 16 bp, synthetic construct
  source 1..16: mol_type = other DNA
ctttgcagcctatccc

SEQ ID NO: 2162 - DNA, 16 bp, synthetic construct
  source 1..16: mol_type = other DNA
tcagcatcattggaag

SEQ ID NO: 2163 - DNA, 16 bp, synthetic construct
  source 1..16: mol_type = other DNA
agtgttagaactaagg

SEQ ID NO: 2164 - DNA, 16 bp, synthetic construct
  source 1..16: mol_type = other DNA
caaagtcttaatgtgg

SEQ ID NO: 2165 - DNA, 16 bp, synthetic construct
  source 1..16: mol_type = other DNA
tgtttgacttagtccg

SEQ ID NO: 2166 - DNA, 16 bp, synthetic construct
  source 1..16: mol_type = other DNA
aatctggtcatatggt

SEQ ID NO: 2167 - DNA, 16 bp, synthetic construct
  source 1..16: mol_type = other DNA
tgcagtgccctggcct

SEQ ID NO: 2168 - DNA, 16 bp, synthetic construct
  source 1..16: mol_type = other DNA
aggttattttaacagc

SEQ ID NO: 2169 - DNA, 16 bp, synthetic construct
  source 1..16: mol_type = other DNA
tgacatttcagagtat

SEQ ID NO: 2170 - DNA, 16 bp, synthetic construct
  source 1..16: mol_type = other DNA
tcaatgtggcttctag

SEQ ID NO: 2171 - DNA, 16 bp, synthetic construct
  source 1..16: mol_type = other DNA
attcaatgtggcttct

SEQ ID NO: 2172 - DNA, 16 bp, synthetic construct
  source 1..16: mol_type = other DNA
tattcaatgtggcttc

SEQ ID NO: 2173 - DNA, 16 bp, synthetic construct
  source 1..16: mol_type = other DNA
  modified_base 1: mod_base = OTHER; note = cEt 5-methyl cytidine 3'-phosphorothioate
  modified_base 2..3: mod_base = OTHER; note = cEt thymidine 3'-phosphorothioate
  modified_base 4: mod_base = OTHER; note = 2'-deoxythymidine 3'-phosphorothioate
  modified_base 5: mod_base = OTHER; note = 2'-deoxyadenosine 3'-phosphorothioate
  modified_base 6..7: mod_base = OTHER; note = 2'-deoxythymidine 3'-phosphorothioate
  modified_base 8: mod_base = OTHER; note = 5-methyl-2'-deoxycytidine 3'-phosphorothioate
  modified_base 9..10: mod_base = OTHER; note = 2'-deoxyadenosine 3'-phosphorothioate
  modified_base 11: mod_base = OTHER; note = 2'-deoxythymidine 3'-phosphorothioate
  modified_base 12: mod_base = OTHER; note = 2'-deoxyguanosine 3'-phosphorothioate
  modified_base 13: mod_base = OTHER; note = 2'-deoxythymidine 3'-phosphorothioate
  modified_base 14..15: mod_base = OTHER; note = cEt guanosine
  modified_base 16: mod_base = OTHER; note = cEt 5-methyl cytidine 3'-phosphorothioate
ctttattcaatgtggc

SEQ ID NO: 2174 - DNA, 16 bp, synthetic construct
  source 1..16: mol_type = other DNA
  modified_base <1: mod_base = OTHER; note = THA-GalNAc phosphodiester
  modified_base 1: mod_base = OTHER; note = cEt 5-methyl cytidine 3'-phosphorothioate
  modified_base 2..3: mod_base = OTHER; note = cEt thymidine 3'-phosphorothioate
  modified_base 4: mod_base = OTHER; note = 2'-deoxythymidine 3'-phosphorothioate
  modified_base 5: mod_base = OTHER; note = 2'-deoxyadenosine 3'-phosphorothioate
  modified_base 6..7: mod_base = OTHER; note = 2'-deoxythymidine 3'-phosphorothioate
  modified_base 8: mod_base = OTHER; note = 5-methyl-2'-deoxycytidine 3'-phosphorothioate
  modified_base 9..10: mod_base = OTHER; note = 2'-deoxyadenosine 3'-phosphorothioate
  modified_base 11: mod_base = OTHER; note = 2'-deoxythymidine 3'-phosphorothioate
  modified_base 12: mod_base = OTHER; note = 2'-deoxyguanosine 3'-phosphorothioate
  modified_base 13: mod_base = OTHER; note = 2'-deoxythymidine 3'-phosphorothioate
  modified_base 14..15: mod_base = OTHER; note = cEt guanosine
  modified_base 16: mod_base = OTHER; note = cEt 5-methyl cytidine 3'-phosphorothioate
ctttattcaatgtggc

SEQ ID NO: 2175 - DNA, 16 bp, synthetic construct
  source 1..16: mol_type = other DNA
  modified_base 1: mod_base = OTHER; note = cEt 5-methyl cytidine 3'-phosphorothioate
  modified_base 2: mod_base = OTHER; note = cEt thymidine 3'-phosphorothioate
  modified_base 3: mod_base = OTHER; note = cEt  adenosine 3'-phosphorothioate
  modified_base 4: mod_base = OTHER; note = 2'-deoxyguanosine 3'-phosphorothioate
  modified_base 5: mod_base = OTHER; note = 2'-deoxythymidine 3'-phosphorothioate
  modified_base 6..8: mod_base = OTHER; note = 2'-deoxyadenosine 3'-phosphorothioate
  modified_base 9: mod_base = OTHER; note = 2'-deoxythymidine 3'-phosphorothioate
  modified_base 10: mod_base = OTHER; note = 2'-deoxyguanosine 3'-phosphorothioate
  modified_base 11: mod_base = OTHER; note = 5-methyl-2'-deoxycytidine 3'-phosphorothioate
  modified_base 12..13: mod_base = OTHER; note = 2'-deoxythymidine 3'-phosphorothioate
  modified_base 14: mod_base = OTHER; note = cEt guanosine
  modified_base 15: mod_base = OTHER; note = cEt thymidine 3'-phosphorothioate
  modified_base 16: mod_base = OTHER; note = cEt 5-methyl cytidine 3'-phosphorothioate
ctagtaaatgcttgtc

SEQ ID NO: 2176 - DNA, 16 bp, synthetic construct
  source 1..16: mol_type = other DNA
  modified_base <1: mod_base = OTHER; note = THA-GalNAc phosphodiester
  modified_base 1: mod_base = OTHER; note = cEt 5-methyl cytidine 3'-phosphorothioate
  modified_base 2: mod_base = OTHER; note = cEt thymidine 3'-phosphorothioate
  modified_base 3: mod_base = OTHER; note = cEt  adenosine 3'-phosphorothioate
  modified_base 4: mod_base = OTHER; note = 2'-deoxyguanosine 3'-phosphorothioate
  modified_base 5: mod_base = OTHER; note = 2'-deoxythymidine 3'-phosphorothioate
  modified_base 6..8: mod_base = OTHER; note = 2'-deoxyadenosine 3'-phosphorothioate
  modified_base 9: mod_base = OTHER; note = 2'-deoxythymidine 3'-phosphorothioate
  modified_base 10: mod_base = OTHER; note = 2'-deoxyguanosine 3'-phosphorothioate
  modified_base 11: mod_base = OTHER; note = 5-methyl-2'-deoxycytidine 3'-phosphorothioate
  modified_base 12..13: mod_base = OTHER; note = 2'-deoxythymidine 3'-phosphorothioate
  modified_base 14: mod_base = OTHER; note = cEt guanosine
  modified_base 15: mod_base = OTHER; note = cEt thymidine 3'-phosphorothioate
  modified_base 16: mod_base = OTHER; note = cEt 5-methyl cytidine 3'-phosphorothioate
ctagtaaatgcttgtc

SEQ ID NO: 2177 - DNA, 16 bp, synthetic construct
  source 1..16: mol_type = other DNA
  modified_base 1: mod_base = OTHER; note = cEt guanosine
  modified_base 2: mod_base = OTHER; note = cEt thymidine 3'-phosphorothioate
  modified_base 3: mod_base = OTHER; note = cEt  adenosine 3'-phosphorothioate
  modified_base 4: mod_base = OTHER; note = 2'-deoxyadenosine 3'-phosphorothioate
  modified_base 5: mod_base = OTHER; note = 2'-deoxythymidine 3'-phosphorothioate
  modified_base 6: mod_base = OTHER; note = 2'-deoxyadenosine 3'-phosphorothioate
  modified_base 7..8: mod_base = OTHER; note = 2'-deoxythymidine 3'-phosphorothioate
  modified_base 9: mod_base = OTHER; note = 5-methyl-2'-deoxycytidine 3'-phosphorothioate
  modified_base 10: mod_base = OTHER; note = 2'-deoxyadenosine 3'-phosphorothioate
  modified_base 11: mod_base = OTHER; note = 2'-deoxyguanosine 3'-phosphorothioate
  modified_base 12: mod_base = OTHER; note = 2'-deoxyadenosine 3'-phosphorothioate
  modified_base 13: mod_base = OTHER; note = 5-methyl-2'-deoxycytidine 3'-phosphorothioate
  modified_base 14: mod_base = OTHER; note = cEt 5-methyl cytidine 3'-phosphorothioate
  modified_base 15: mod_base = OTHER; note = cEt  adenosine 3'-phosphorothioate
  modified_base 16: mod_base = OTHER; note = cEt guanosine
gtaatattcagaccag

SEQ ID NO: 2178 - DNA, 16 bp, synthetic construct
  source 1..16: mol_type = other DNA
  modified_base <1: mod_base = OTHER; note = THA-GalNAc phosphodiester
  modified_base 1: mod_base = OTHER; note = cEt guanosine
  modified_base 2: mod_base = OTHER; note = cEt thymidine 3'-phosphorothioate
  modified_base 3: mod_base = OTHER; note = cEt  adenosine 3'-phosphorothioate
  modified_base 4: mod_base = OTHER; note = 2'-deoxyadenosine 3'-phosphorothioate
  modified_base 5: mod_base = OTHER; note = 2'-deoxythymidine 3'-phosphorothioate
  modified_base 6: mod_base = OTHER; note = 2'-deoxyadenosine 3'-phosphorothioate
  modified_base 7..8: mod_base = OTHER; note = 2'-deoxythymidine 3'-phosphorothioate
  modified_base 9: mod_base = OTHER; note = 5-methyl-2'-deoxycytidine 3'-phosphorothioate
  modified_base 10: mod_base = OTHER; note = 2'-deoxyadenosine 3'-phosphorothioate
  modified_base 11: mod_base = OTHER; note = 2'-deoxyguanosine 3'-phosphorothioate
  modified_base 12: mod_base = OTHER; note = 2'-deoxyadenosine 3'-phosphorothioate
  modified_base 13: mod_base = OTHER; note = 5-methyl-2'-deoxycytidine 3'-phosphorothioate
  modified_base 14: mod_base = OTHER; note = cEt 5-methyl cytidine 3'-phosphorothioate
  modified_base 15: mod_base = OTHER; note = cEt  adenosine 3'-phosphorothioate
  modified_base 16: mod_base = OTHER; note = cEt guanosine
gtaatattcagaccag

1-41. (canceled)

42. A method of treating, preventing, or ameliorating a disease associated with PNPLA3 in an individual comprising administering to the individual a compound, wherein the anionic form of the compound has the following formula (SEQ ID NO: 1089): [chemical structure]
or a pharmaceutically acceptable salt thereof, thereby treating, preventing, or ameliorating the disease.

43. (canceled)

44. (canceled)

45. The method of claim 42, wherein the disease is liver disease, NAFLD, hepatic steatosis, non-alcoholic steatohepatitis (NASH), liver cirrhosis, hepatocellular carcinoma, alcoholic liver disease, alcoholic steatohepatitis (ASH), HCV hepatitis, chronic hepatitis, hereditary hemochromatosis, or primary sclerosing cholangitis.

46. The method of claim 42, wherein administering the compound inhibits or reduces or improves liver damage, steatosis, liver fibrosis, liver inflammation, liver scarring or cirrhosis, liver failure, liver enlargement, elevated transaminases, or hepatic fat accumulation in the individual.

47. A method of inhibiting expression of PNPLA3 in a cell comprising contacting the cell with a compound, wherein the anionic form of the compound has the following formula (SEQ ID NO: 1089): [chemical structure]
or a pharmaceutically acceptable salt thereof, thereby inhibiting expression of PNPLA3 in the cell.

48. The method of claim 47, wherein the cell is in the liver of an individual.

49. The method of claim 48, wherein the individual has, or is at risk of having, liver disease, NAFLD, hepatic steatosis, non-alcoholic steatohepatitis (NASH), liver cirrhosis, hepatocellular carcinoma, alcoholic liver disease, alcoholic steatohepatitis (ASH), HCV hepatitis, chronic hepatitis, hereditary hemochromatosis, or primary sclerosing cholangitis.

50. A method of reducing or inhibiting liver damage, steatosis, liver fibrosis, liver inflammation, liver scarring or cirrhosis, liver failure, liver enlargement, elevated transaminases, or hepatic fat accumulation in an individual, comprising administering a compound, wherein the anionic form of the compound has the following formula (SEQ ID NO: 1089): [chemical structure]
or a pharmaceutically acceptable salt thereof, to the individual, thereby reducing or inhibiting liver damage, steatosis, liver fibrosis, liver inflammation, liver scarring or cirrhosis, liver failure, liver enlargement, elevated transaminases, or hepatic fat accumulation in the individual.

51. The method of claim 50, wherein the individual has, or is at risk of having, liver disease, NAFLD, hepatic steatosis, non-alcoholic steatohepatitis (NASH), liver cirrhosis, hepatocellular carcinoma, alcoholic liver disease, alcoholic steatohepatitis (ASH), HCV hepatitis, chronic hepatitis, hereditary hemochromatosis, or primary sclerosing cholangitis.

52-62. (canceled)
